United States Patent Application Publication US 2011/0288155 A1 - sequence listing, part 2

SEQ ID NO: 21678 - RNA, 19 nt, artificial
  Chemically synthesized
aagccaaagauuucugcac

SEQ ID NO: 21679 - RNA, 19 nt, artificial
  Chemically synthesized
acacuggauaccacucccu

SEQ ID NO: 21680 - RNA, 19 nt, artificial
  Chemically synthesized
ugcacggguauuuaaugug

SEQ ID NO: 21681 - RNA, 19 nt, artificial
  Chemically synthesized
gcacggguauuuaaugugg

SEQ ID NO: 21682 - RNA, 19 nt, artificial
  Chemically synthesized
uuugcuacagaaagugccu

SEQ ID NO: 21683 - RNA, 19 nt, artificial
  Chemically synthesized
aaacugaacuaggauucgg

SEQ ID NO: 21684 - RNA, 19 nt, artificial
  Chemically synthesized
aacugaacuaggauucggg

SEQ ID NO: 21685 - RNA, 19 nt, artificial
  Chemically synthesized
aacagaacaggcuuuuagg

SEQ ID NO: 21686 - RNA, 19 nt, artificial
  Chemically synthesized
acagaacaggcuuuuaggg

SEQ ID NO: 21687 - RNA, 19 nt, artificial
  Chemically synthesized
aggagcagcaaguucacgu

SEQ ID NO: 21688 - RNA, 19 nt, artificial
  Chemically synthesized
aagagguuguacauucuuc

SEQ ID NO: 21689 - RNA, 19 nt, artificial
  Chemically synthesized
acgcaguggauauaguucc

SEQ ID NO: 21690 - RNA, 19 nt, artificial
  Chemically synthesized
uggauauaguuccagaugg

SEQ ID NO: 21691 - RNA, 19 nt, artificial
  Chemically synthesized
uggcgaugguauuguaggu

SEQ ID NO: 21692 - RNA, 19 nt, artificial
  Chemically synthesized
aaaguagggucuuccacaa

SEQ ID NO: 21693 - RNA, 19 nt, artificial
  Chemically synthesized
ugaaacaaaaccucagcga

SEQ ID NO: 21694 - RNA, 19 nt, artificial
  Chemically synthesized
uggaacugguagcaaagcc

SEQ ID NO: 21695 - RNA, 19 nt, artificial
  Chemically synthesized
auuucugcacuugaacacu

SEQ ID NO: 21696 - RNA, 19 nt, artificial
  Chemically synthesized
cacggguauuuaauguggc

SEQ ID NO: 21697 - RNA, 19 nt, artificial
  Chemically synthesized
uaauguggcacacuggcca

SEQ ID NO: 21698 - RNA, 19 nt, artificial
  Chemically synthesized
cauuugcuacagaaagugc

SEQ ID NO: 21699 - RNA, 19 nt, artificial
  Chemically synthesized
auguagccauggucaccug

SEQ ID NO: 21700 - RNA, 19 nt, artificial
  Chemically synthesized
agcaacuuguugaucucgc

SEQ ID NO: 21701 - RNA, 19 nt, artificial
  Chemically synthesized
caaugugaccagcaaaggc

SEQ ID NO: 21702 - RNA, 19 nt, artificial
  Chemically synthesized
acuuucacauugaugggug

SEQ ID NO: 21703 - RNA, 19 nt, artificial
  Chemically synthesized
acauugaugggugaauggc

SEQ ID NO: 21704 - RNA, 19 nt, artificial
  Chemically synthesized
gaaaucuggaaaugacagg

SEQ ID NO: 21705 - RNA, 19 nt, artificial
  Chemically synthesized
aaggccacaacacuugugg

SEQ ID NO: 21706 - RNA, 19 nt, artificial
  Chemically synthesized
uuguacauucuucgggugg

SEQ ID NO: 21707 - RNA, 19 nt, artificial
  Chemically synthesized
uagucaucauaucugaugc

SEQ ID NO: 21708 - RNA, 19 nt, artificial
  Chemically synthesized
uccgaaaguagggucuucc

SEQ ID NO: 21709 - RNA, 19 nt, artificial
  Chemically synthesized
uuuggugcuggacucuucc

SEQ ID NO: 21710 - RNA, 19 nt, artificial
  Chemically synthesized
cagugaacauuuacaguca

SEQ ID NO: 21711 - RNA, 19 nt, artificial
  Chemically synthesized
uugcaagaaaauccgcuug

SEQ ID NO: 21712 - RNA, 19 nt, artificial
  Chemically synthesized
ugcaagaaaauccgcuugc

SEQ ID NO: 21713 - RNA, 19 nt, artificial
  Chemically synthesized
agguuuggcaauguagcca

SEQ ID NO: 21714 - RNA, 19 nt, artificial
  Chemically synthesized
uaagccaucuagaaaggcu

SEQ ID NO: 21715 - RNA, 19 nt, artificial
  Chemically synthesized
aggcucaacuuuuugggag

SEQ ID NO: 21716 - RNA, 19 nt, artificial
  Chemically synthesized
aacuuuuugggagacaucu

SEQ ID NO: 21717 - RNA, 19 nt, artificial
  Chemically synthesized
aaccucaagcauaaaggac

SEQ ID NO: 21718 - RNA, 19 nt, artificial
  Chemically synthesized
aaacucucuagagauaauc

SEQ ID NO: 21719 - RNA, 19 nt, artificial
  Chemically synthesized
cacauugaugggugaaugg

SEQ ID NO: 21720 - RNA, 19 nt, artificial
  Chemically synthesized
ugagaucccagagucagug

SEQ ID NO: 21721 - RNA, 19 nt, artificial
  Chemically synthesized
cagacagagaaguccuugu

SEQ ID NO: 21722 - RNA, 19 nt, artificial
  Chemically synthesized
agcaaguucacguggaccu

SEQ ID NO: 21723 - RNA, 19 nt, artificial
  Chemically synthesized
uugauauagaccuugaggu

SEQ ID NO: 21724 - RNA, 19 nt, artificial
  Chemically synthesized
agaagcugguaaaguaguc

SEQ ID NO: 21725 - RNA, 19 nt, artificial
  Chemically synthesized
auccgaaaguagggucuuc

SEQ ID NO: 21726 - RNA, 19 nt, artificial
  Chemically synthesized
aagcacagcaugucugggu

SEQ ID NO: 21727 - RNA, 19 nt, artificial
  Chemically synthesized
cuggauguguuccuuggug

SEQ ID NO: 21728 - RNA, 19 nt, artificial
  Chemically synthesized
aagccaucuagaaaggcuc

SEQ ID NO: 21729 - RNA, 19 nt, artificial
  Chemically synthesized
uagaaaggcucaacuuuuu

SEQ ID NO: 21730 - RNA, 19 nt, artificial
  Chemically synthesized
aauucucccucuccuccuc

SEQ ID NO: 21731 - RNA, 19 nt, artificial
  Chemically synthesized
cagaaggcaaugugaccag

SEQ ID NO: 21732 - RNA, 19 nt, artificial
  Chemically synthesized
aacucucuagagauaaucu

SEQ ID NO: 21733 - RNA, 19 nt, artificial
  Chemically synthesized
gaagucaaaaaacugaacu

SEQ ID NO: 21734 - RNA, 19 nt, artificial
  Chemically synthesized
cuuuuagggaacuggacac

SEQ ID NO: 21735 - RNA, 19 nt, artificial
  Chemically synthesized
ugacuuucacauugauggg

SEQ ID NO: 21736 - RNA, 19 nt, artificial
  Chemically synthesized
cuuucacauugauggguga

SEQ ID NO: 21737 - RNA, 19 nt, artificial
  Chemically synthesized
uaccagguaagaacacuga

SEQ ID NO: 21738 - RNA, 19 nt, artificial
  Chemically synthesized
uuaggaucuccaagugcuc

SEQ ID NO: 21739 - RNA, 19 nt, artificial
  Chemically synthesized
uaggaucuccaagugcucu

SEQ ID NO: 21740 - RNA, 19 nt, artificial
  Chemically synthesized
uaagaacacugauggcggg

SEQ ID NO: 21741 - RNA, 19 nt, artificial
  Chemically synthesized
ucuccagacagagaagucc

SEQ ID NO: 21742 - RNA, 19 nt, artificial
  Chemically synthesized
acagagaaguccuuguggg

SEQ ID NO: 21743 - RNA, 19 nt, artificial
  Chemically synthesized
agaagagguuguacauucu

SEQ ID NO: 21744 - RNA, 19 nt, artificial
  Chemically synthesized
gagguuguacauucuucgg

SEQ ID NO: 21745 - RNA, 19 nt, artificial
  Chemically synthesized
ugucuugauauagaccuug

SEQ ID NO: 21746 - RNA, 19 nt, artificial
  Chemically synthesized
auagaccuugagguuccgc

SEQ ID NO: 21747 - RNA, 19 nt, artificial
  Chemically synthesized
uagaccuugagguuccgcu

SEQ ID NO: 21748 - RNA, 19 nt, artificial
  Chemically synthesized
auaucugaugccaaagacg

SEQ ID NO: 21749 - RNA, 19 nt, artificial
  Chemically synthesized
cauauccgaaaguaggguc

SEQ ID NO: 21750 - RNA, 19 nt, artificial
  Chemically synthesized
acccagugaacauuuacag

SEQ ID NO: 21751 - RNA, 19 nt, artificial
  Chemically synthesized
gagaagucguaauucacag

SEQ ID NO: 21752 - RNA, 19 nt, artificial
  Chemically synthesized
ggacagaugagauacuggg

SEQ ID NO: 21753 - RNA, 19 nt, artificial
  Chemically synthesized
gagguuuggcaauguagcc

SEQ ID NO: 21754 - RNA, 19 nt, artificial
  Chemically synthesized
gucuugauauagaccuuga

SEQ ID NO: 21755 - RNA, 19 nt, artificial
  Chemically synthesized
ugauggcaauguaguggcg

SEQ ID NO: 21756 - RNA, 19 nt, artificial
  Chemically synthesized
ucccagguauaauccuggg

SEQ ID NO: 21757 - RNA, 19 nt, artificial
  Chemically synthesized
ucauauccgaaaguagggu

SEQ ID NO: 21758 - RNA, 19 nt, artificial
  Chemically synthesized
ucucugacuucuccagcuc

SEQ ID NO: 21759 - RNA, 19 nt, artificial
  Chemically synthesized
aaggccuggauguguuccu

SEQ ID NO: 21760 - RNA, 19 nt, artificial
  Chemically synthesized
acggguauuuaauguggca

SEQ ID NO: 21761 - RNA, 19 nt, artificial
  Chemically synthesized
aagagaagucguaauucac

SEQ ID NO: 21762 - RNA, 19 nt, artificial
  Chemically synthesized
acacuggcugcagaaaugg

SEQ ID NO: 21763 - RNA, 19 nt, artificial
  Chemically synthesized
aggguccaaacaagaaccc

SEQ ID NO: 21764 - RNA, 19 nt, artificial
  Chemically synthesized
agaaaggcucaacuuuuug

SEQ ID NO: 21765 - RNA, 19 nt, artificial
  Chemically synthesized
ugggagaacagaauucucc

SEQ ID NO: 21766 - RNA, 19 nt, artificial
  Chemically synthesized
agaaggcaaugugaccagc

SEQ ID NO: 21767 - RNA, 19 nt, artificial
  Chemically synthesized
aaccgcagguaguccuuga

SEQ ID NO: 21768 - RNA, 19 nt, artificial
  Chemically synthesized
agucaaaaaacugaacuag

SEQ ID NO: 21769 - RNA, 19 nt, artificial
  Chemically synthesized
gaacuggacacacagacca

SEQ ID NO: 21770 - RNA, 19 nt, artificial
  Chemically synthesized
cagguaagaacacugaugg

SEQ ID NO: 21771 - RNA, 19 nt, artificial
  Chemically synthesized
augggacacaaaagggucu

SEQ ID NO: 21772 - RNA, 19 nt, artificial
  Chemically synthesized
auucuucggguggucuucu

SEQ ID NO: 21773 - RNA, 19 nt, artificial
  Chemically synthesized
ggauauaguuccagauggc

SEQ ID NO: 21774 - RNA, 19 nt, artificial
  Chemically synthesized
aguuguucaacgggucccu

SEQ ID NO: 21775 - RNA, 19 nt, artificial
  Chemically synthesized
aagggcaagagaagucgua

SEQ ID NO: 21776 - RNA, 19 nt, artificial
  Chemically synthesized
uguuccuuggugaugagcc

SEQ ID NO: 21777 - RNA, 19 nt, artificial
  Chemically synthesized
gucagagguuuggcaaugu

SEQ ID NO: 21778 - RNA, 19 nt, artificial
  Chemically synthesized
uuggcaauguagccauggu

SEQ ID NO: 21779 - RNA, 19 nt, artificial
  Chemically synthesized
cuaagccaucuagaaaggc

SEQ ID NO: 21780 - RNA, 19 nt, artificial
  Chemically synthesized
aaggcucaacuuuuuggga

SEQ ID NO: 21781 - RNA, 19 nt, artificial
  Chemically synthesized
accucaagcauaaaggacc

SEQ ID NO: 21782 - RNA, 19 nt, artificial
  Chemically synthesized
agcaaaggcucaaacucuc

SEQ ID NO: 21783 - RNA, 19 nt, artificial
  Chemically synthesized
aggaagucaaaaaacugaa

SEQ ID NO: 21784 - RNA, 19 nt, artificial
  Chemically synthesized
caggcuuuuagggaacugg

SEQ ID NO: 21785 - RNA, 19 nt, artificial
  Chemically synthesized
uuuuagggaacuggacaca

SEQ ID NO: 21786 - RNA, 19 nt, artificial
  Chemically synthesized
uccaagugcucuuccagcu

SEQ ID NO: 21787 - RNA, 19 nt, artificial
  Chemically synthesized
uuccagugaggaaaaggga

SEQ ID NO: 21788 - RNA, 19 nt, artificial
  Chemically synthesized
gacagagaaguccuugugg

SEQ ID NO: 21789 - RNA, 19 nt, artificial
  Chemically synthesized
ugccuccagaagagguugu

SEQ ID NO: 21790 - RNA, 19 nt, artificial
  Chemically synthesized
auagucaucauaucugaug

SEQ ID NO: 21791 - RNA, 19 nt, artificial
  Chemically synthesized
agucaucauaucugaugcc

SEQ ID NO: 21792 - RNA, 19 nt, artificial
  Chemically synthesized
ugaugccaaagacgcagug

SEQ ID NO: 21793 - RNA, 19 nt, artificial
  Chemically synthesized
auaguuccagauggcccug

SEQ ID NO: 21794 - RNA, 19 nt, artificial
  Chemically synthesized
gaagcugguaaaguaguca

SEQ ID NO: 21795 - RNA, 19 nt, artificial
  Chemically synthesized
agcugguaaaguagucagg

SEQ ID NO: 21796 - RNA, 19 nt, artificial
  Chemically synthesized
aucagcgaguagccauggu

SEQ ID NO: 21797 - RNA, 19 nt, artificial
  Chemically synthesized
cuucccagguauaauccug

SEQ ID NO: 21798 - RNA, 19 nt, artificial
  Chemically synthesized
cucauauccgaaaguaggg

SEQ ID NO: 21799 - RNA, 19 nt, artificial
  Chemically synthesized
uggauguguuccuugguga

SEQ ID NO: 21800 - RNA, 19 nt, artificial
  Chemically synthesized
ucugggagaacagaauucu

SEQ ID NO: 21801 - RNA, 19 nt, artificial
  Chemically synthesized
cacaccauuaagcauggag

SEQ ID NO: 21802 - RNA, 19 nt, artificial
  Chemically synthesized
agaucccagagucagugca

SEQ ID NO: 21803 - RNA, 19 nt, artificial
  Chemically synthesized
uccaggagcagcaaguuca

SEQ ID NO: 21804 - RNA, 19 nt, artificial
  Chemically synthesized
agugaaguccucauauccg

SEQ ID NO: 21805 - RNA, 19 nt, artificial
  Chemically synthesized
gugaaguccucauauccga

SEQ ID NO: 21806 - RNA, 19 nt, artificial
  Chemically synthesized
guagggucuuccacaaagc

SEQ ID NO: 21807 - RNA, 19 nt, artificial
  Chemically synthesized
agaguuguucaacgggucc

SEQ ID NO: 21808 - RNA, 19 nt, artificial
  Chemically synthesized
cacagccaaacacgaagga

SEQ ID NO: 21809 - RNA, 19 nt, artificial
  Chemically synthesized
uucagugcccuccaaacug

SEQ ID NO: 21810 - RNA, 19 nt, artificial
  Chemically synthesized
guuccuuggugaugagcca

SEQ ID NO: 21811 - RNA, 19 nt, artificial
  Chemically synthesized
gaaagugccuggaaucggu

SEQ ID NO: 21812 - RNA, 19 nt, artificial
  Chemically synthesized
augcgccagcaacuuguug

SEQ ID NO: 21813 - RNA, 19 nt, artificial
  Chemically synthesized
ugcgccagcaacuuguuga

SEQ ID NO: 21814 - RNA, 19 nt, artificial
  Chemically synthesized
uuuggcaauguagccaugg

SEQ ID NO: 21815 - RNA, 19 nt, artificial
  Chemically synthesized
cucugggagaacagaauuc

SEQ ID NO: 21816 - RNA, 19 nt, artificial
  Chemically synthesized
cagguuggaaccucaagca

SEQ ID NO: 21817 - RNA, 19 nt, artificial
  Chemically synthesized
augugaccagcaaaggcuc

SEQ ID NO: 21818 - RNA, 19 nt, artificial
  Chemically synthesized
acucucuagagauaaucug

SEQ ID NO: 21819 - RNA, 19 nt, artificial
  Chemically synthesized
cucucuagagauaaucugc

SEQ ID NO: 21820 - RNA, 19 nt, artificial
  Chemically synthesized
cucacaccauuaagcaugg

SEQ ID NO: 21821 - RNA, 19 nt, artificial
  Chemically synthesized
acugaacuaggauucgggc

SEQ ID NO: 21822 - RNA, 19 nt, artificial
  Chemically synthesized
aggaaggccacaacacuug

SEQ ID NO: 21823 - RNA, 19 nt, artificial
  Chemically synthesized
gaacuguccauuccaguga

SEQ ID NO: 21824 - RNA, 19 nt, artificial
  Chemically synthesized
cauaucugaugccaaagac

SEQ ID NO: 21825 - RNA, 19 nt, artificial
  Chemically synthesized
aucugaugccaaagacgca

SEQ ID NO: 21826 - RNA, 19 nt, artificial
  Chemically synthesized
ucugaugccaaagacgcag

SEQ ID NO: 21827 - RNA, 19 nt, artificial
  Chemically synthesized
uguaggugaggcuauaggc

SEQ ID NO: 21828 - RNA, 19 nt, artificial
  Chemically synthesized
cugguaaaguagucagggu

SEQ ID NO: 21829 - RNA, 19 nt, artificial
  Chemically synthesized
gagugaaguccucauaucc

SEQ ID NO: 21830 - RNA, 19 nt, artificial
  Chemically synthesized
acuucuccagcucaaagcg

SEQ ID NO: 21831 - RNA, 19 nt, artificial
  Chemically synthesized
aaagccaaagauuucugca

SEQ ID NO: 21832 - RNA, 19 nt, artificial
  Chemically synthesized
agacugcuagaagaagggc

SEQ ID NO: 21833 - RNA, 19 nt, artificial
  Chemically synthesized
cagaaagugccuggaaucg

SEQ ID NO: 21834 - RNA, 19 nt, artificial
  Chemically synthesized
uggcaauguagccaugguc

SEQ ID NO: 21835 - RNA, 19 nt, artificial
  Chemically synthesized
caggguccaaacaagaacc

SEQ ID NO: 21836 - RNA, 19 nt, artificial
  Chemically synthesized
ucagaaggcaaugugacca

SEQ ID NO: 21837 - RNA, 19 nt, artificial
  Chemically synthesized
uuuagggaacuggacacac

SEQ ID NO: 21838 - RNA, 19 nt, artificial
  Chemically synthesized
uuagggaacuggacacaca

SEQ ID NO: 21839 - RNA, 19 nt, artificial
  Chemically synthesized
cuaccagguaagaacacug

SEQ ID NO: 21840 - RNA, 19 nt, artificial
  Chemically synthesized
agguaguccuugagcucug

SEQ ID NO: 21841 - RNA, 19 nt, artificial
  Chemically synthesized
ugggacacaaaagggucug

SEQ ID NO: 21842 - RNA, 19 nt, artificial
  Chemically synthesized
gucaucauaucugaugcca

SEQ ID NO: 21843 - RNA, 19 nt, artificial
  Chemically synthesized
augccaaagacgcagugga

SEQ ID NO: 21844 - RNA, 19 nt, artificial
  Chemically synthesized
auuguaggugaggcuauag

SEQ ID NO: 21845 - RNA, 19 nt, artificial
  Chemically synthesized
uaggcugccuggaacuucu

SEQ ID NO: 21846 - RNA, 19 nt, artificial
  Chemically synthesized
aaagugccuggaaucgguc

SEQ ID NO: 21847 - RNA, 19 nt, artificial
  Chemically synthesized
cagcaacuuguugaucucg

SEQ ID NO: 21848 - RNA, 19 nt, artificial
  Chemically synthesized
gagaacagaauucucccuc

SEQ ID NO: 21849 - RNA, 19 nt, artificial
  Chemically synthesized
acuucccaguucaggaagg

SEQ ID NO: 21850 - RNA, 19 nt, artificial
  Chemically synthesized
uaggugaggcuauaggcug

SEQ ID NO: 21851 - RNA, 19 nt, artificial
  Chemically synthesized
auaggcugccuggaacuuc

SEQ ID NO: 21852 - RNA, 19 nt, artificial
  Chemically synthesized
ugccuggaacuucucaucc

SEQ ID NO: 21853 - RNA, 19 nt, artificial
  Chemically synthesized
accagagccugaaugagcu

SEQ ID NO: 21854 - RNA, 19 nt, artificial
  Chemically synthesized
gacugcuagaagaagggca

SEQ ID NO: 21855 - RNA, 19 nt, artificial
  Chemically synthesized
ugaucucgcugaguuugcg

SEQ ID NO: 21856 - RNA, 19 nt, artificial
  Chemically synthesized
aacuggacacacagaccag

SEQ ID NO: 21857 - RNA, 19 nt, artificial
  Chemically synthesized
agagaaggcaaagcugccu

SEQ ID NO: 21858 - RNA, 19 nt, artificial
  Chemically synthesized
gaaggccacaacacuugug

SEQ ID NO: 21859 - RNA, 19 nt, artificial
  Chemically synthesized
ucacaccauuaagcaugga

SEQ ID NO: 21860 - RNA, 19 nt, artificial
  Chemically synthesized
uggaacuucucauccagca

SEQ ID NO: 21861 - RNA, 19 nt, artificial
  Chemically synthesized
cuuaggaucuccaagugcu

SEQ ID NO: 21862 - RNA, 19 nt, artificial
  Chemically synthesized
aacuguccauuccagugag

SEQ ID NO: 21863 - RNA, 19 nt, artificial
  Chemically synthesized
gucuuccacaaagcacagc

SEQ ID NO: 21864 - RNA, 19 nt, artificial
  Chemically synthesized
cuugccuuucuucagugcc

SEQ ID NO: 21865 - RNA, 19 nt, artificial
  Chemically synthesized
acuguccauuccagugagg

SEQ ID NO: 21866 - RNA, 19 nt, artificial
  Chemically synthesized
gggaguauuagauuauaaa

SEQ ID NO: 21867 - RNA, 19 nt, artificial
  Chemically synthesized
ccauaugaugagaaauaaa

SEQ ID NO: 21868 - RNA, 19 nt, artificial
  Chemically synthesized
cagagaagguccacgugaa

SEQ ID NO: 21869 - RNA, 19 nt, artificial
  Chemically synthesized
ggcaugugaugacuguaaa

SEQ ID NO: 21870 - RNA, 19 nt, artificial
  Chemically synthesized
gggccaagcucggaauuaa

SEQ ID NO: 21871 - RNA, 19 nt, artificial
  Chemically synthesized
gguucuagagggcauguga

SEQ ID NO: 21872 - RNA, 19 nt, artificial
  Chemically synthesized
gauuauaaauccucuuuau

SEQ ID NO: 21873 - RNA, 19 nt, artificial
  Chemically synthesized
ggaguauuagauuauaaau

SEQ ID NO: 21874 - RNA, 19 nt, artificial
  Chemically synthesized
gagggaguauuagauuaua

SEQ ID NO: 21875 - RNA, 19 nt, artificial
  Chemically synthesized
ccgcagaugucucccaaaa

SEQ ID NO: 21876 - RNA, 19 nt, artificial
  Chemically synthesized
agggaguauuagauuauaa

SEQ ID NO: 21877 - RNA, 19 nt, artificial
  Chemically synthesized
gggcaugugaugacuguaa

SEQ ID NO: 21878 - RNA, 19 nt, artificial
  Chemically synthesized
ugaagaggagggaguauua

SEQ ID NO: 21879 - RNA, 19 nt, artificial
  Chemically synthesized
uguagcaaaugacugugaa

SEQ ID NO: 21880 - RNA, 19 nt, artificial
  Chemically synthesized
aaaugacugugaauuacga

SEQ ID NO: 21881 - RNA, 19 nt, artificial
  Chemically synthesized
cagauaugaugacuaugau

SEQ ID NO: 21882 - RNA, 19 nt, artificial
  Chemically synthesized
ugugaugugcagucccgaa

SEQ ID NO: 21883 - RNA, 19 nt, artificial
  Chemically synthesized
cagagggcacaggaaagaa

SEQ ID NO: 21884 - RNA, 19 nt, artificial
  Chemically synthesized
ggcacuuucuguagcaaau

SEQ ID NO: 21885 - RNA, 19 nt, artificial
  Chemically synthesized
agugguauccaguguucaa

SEQ ID NO: 21886 - RNA, 19 nt, artificial
  Chemically synthesized
aggugugcaggagagaaga

SEQ ID NO: 21887 - RNA, 19 nt, artificial
  Chemically synthesized
ccugcacccugacuacuuu

SEQ ID NO: 21888 - RNA, 19 nt, artificial
  Chemically synthesized
aacucagcgagaucaacaa

SEQ ID NO: 21889 - RNA, 19 nt, artificial
  Chemically synthesized
gcuaccaguuccauaugau

SEQ ID NO: 21890 - RNA, 19 nt, artificial
  Chemically synthesized
cauggcucaucaccaagga

SEQ ID NO: 21891 - RNA, 19 nt, artificial
  Chemically synthesized
gaaggugugcaggagagaa

SEQ ID NO: 21892 - RNA, 19 nt, artificial
  Chemically synthesized
uccauaugaugagaaauaa

SEQ ID NO: 21893 - RNA, 19 nt, artificial
  Chemically synthesized
caugcugugcuuuguggaa

SEQ ID NO: 21894 - RNA, 19 nt, artificial
  Chemically synthesized
agcaaaugacugugaauua

SEQ ID NO: 21895 - RNA, 19 nt, artificial
  Chemically synthesized
cuuugcuaccaguuccaua

SEQ ID NO: 21896 - RNA, 19 nt, artificial
  Chemically synthesized
ccuacuugccauucaccca

SEQ ID NO: 21897 - RNA, 19 nt, artificial
  Chemically synthesized
cagauuucauuaccuccua

SEQ ID NO: 21898 - RNA, 19 nt, artificial
  Chemically synthesized
cuggaagagcacuuggaga

SEQ ID NO: 21899 - RNA, 19 nt, artificial
  Chemically synthesized
aggagggaguauuagauua

SEQ ID NO: 21900 - RNA, 19 nt, artificial
  Chemically synthesized
ggagggaguauuagauuau

SEQ ID NO: 21901 - RNA, 19 nt, artificial
  Chemically synthesized
caagaaggugugcaggaga

SEQ ID NO: 21902 - RNA, 19 nt, artificial
  Chemically synthesized
ucuuuauuuugguccuuua

SEQ ID NO: 21903 - RNA, 19 nt, artificial
  Chemically synthesized
aagaggagggaguauuaga

SEQ ID NO: 21904 - RNA, 19 nt, artificial
  Chemically synthesized
ccuauagccucaccuacaa

SEQ ID NO: 21905 - RNA, 19 nt, artificial
  Chemically synthesized
gaauggacaguucauugca

SEQ ID NO: 21906 - RNA, 19 nt, artificial
  Chemically synthesized
guucuagagggcaugugau

SEQ ID NO: 21907 - RNA, 19 nt, artificial
  Chemically synthesized
cuguguguccaguucccua

SEQ ID NO: 21908 - RNA, 19 nt, artificial
  Chemically synthesized
guuuggagggcacugaaga

SEQ ID NO: 21909 - RNA, 19 nt, artificial
  Chemically synthesized
auaugaugacuaugauuau

SEQ ID NO: 21910 - RNA, 19 nt, artificial
  Chemically synthesized
cuuuauuuugguccuuuau

SEQ ID NO: 21911 - RNA, 19 nt, artificial
  Chemically synthesized
ccuuuuucccuuuucucca

SEQ ID NO: 21912 - RNA, 19 nt, artificial
  Chemically synthesized
gcuacauugccaaaccucu

SEQ ID NO: 21913 - RNA, 19 nt, artificial
  Chemically synthesized
uuuggagggcacugaagaa

SEQ ID NO: 21914 - RNA, 19 nt, artificial
  Chemically synthesized
ccaguuccauaugaugaga

SEQ ID NO: 21915 - RNA, 19 nt, artificial
  Chemically synthesized
gaaaucuuuggcuuugcua

SEQ ID NO: 21916 - RNA, 19 nt, artificial
  Chemically synthesized
cuuucuguagcaaaugacu

SEQ ID NO: 21917 - RNA, 19 nt, artificial
  Chemically synthesized
ugucauuuccagauuucau

SEQ ID NO: 21918 - RNA, 19 nt, artificial
  Chemically synthesized
cauugcacugacucuggga

SEQ ID NO: 21919 - RNA, 19 nt, artificial
  Chemically synthesized
cuuugagcuggagaaguca

SEQ ID NO: 21920 - RNA, 19 nt, artificial
  Chemically synthesized
ccuccucucugaccaguuu

SEQ ID NO: 21921 - RNA, 19 nt, artificial
  Chemically synthesized
ucaagacaguggccugcua

SEQ ID NO: 21922 - RNA, 19 nt, artificial
  Chemically synthesized
cuugccauucacccaucaa

SEQ ID NO: 21923 - RNA, 19 nt, artificial
  Chemically synthesized
gagggcaugugaugacugu

SEQ ID NO: 21924 - RNA, 19 nt, artificial
  Chemically synthesized
agggcaugugaugacugua

SEQ ID NO: 21925 - RNA, 19 nt, artificial
  Chemically synthesized
caaaccucugacugccaca

SEQ ID NO: 21926 - RNA, 19 nt, artificial
  Chemically synthesized
agggccaucuggaacuaua

SEQ ID NO: 21927 - RNA, 19 nt, artificial
  Chemically synthesized
gaggagggaguauuagauu

SEQ ID NO: 21928 - RNA, 19 nt, artificial
  Chemically synthesized
cuagagaguuugagccuuu

SEQ ID NO: 21929 - RNA, 19 nt, artificial
  Chemically synthesized
ucauuuccagauuucauua

SEQ ID NO: 21930 - RNA, 19 nt, artificial
  Chemically synthesized
agauaugaugacuaugauu

SEQ ID NO: 21931 - RNA, 19 nt, artificial
  Chemically synthesized
ggagagggagaauucuguu

SEQ ID NO: 21932 - RNA, 19 nt, artificial
  Chemically synthesized
ccaggcacuuucuguagca

SEQ ID NO: 21933 - RNA, 19 nt, artificial
  Chemically synthesized
agauuauaaauccucuuua

SEQ ID NO: 21934 - RNA, 19 nt, artificial
  Chemically synthesized
guguuguggccuuccugaa

SEQ ID NO: 21935 - RNA, 19 nt, artificial
  Chemically synthesized
agaaauaaacguucgcuga

SEQ ID NO: 21936 - RNA, 19 nt, artificial
  Chemically synthesized
cacuggaauggacaguuca

SEQ ID NO: 21937 - RNA, 19 nt, artificial
  Chemically synthesized
uuugguccuuuaugcuuga

SEQ ID NO: 21938 - RNA, 19 nt, artificial
  Chemically synthesized
gagugguauccaguguuca

SEQ ID NO: 21939 - RNA, 19 nt, artificial
  Chemically synthesized
agaaggugugcaggagaga

SEQ ID NO: 21940 - RNA, 19 nt, artificial
  Chemically synthesized
ugugaugacuguaaauguu

SEQ ID NO: 21941 - RNA, 19 nt, artificial
  Chemically synthesized
cuuucuagauggcuuaggu

SEQ ID NO: 21942 - RNA, 19 nt, artificial
  Chemically synthesized
gcuacaugaccugacuccu

SEQ ID NO: 21943 - RNA, 19 nt, artificial
  Chemically synthesized
cagaugucucccaaaaagu

SEQ ID NO: 21944 - RNA, 19 nt, artificial
  Chemically synthesized
cuuuaugcuugagguucca

SEQ ID NO: 21945 - RNA, 19 nt, artificial
  Chemically synthesized
uacaugaccugacuccuga

SEQ ID NO: 21946 - RNA, 19 nt, artificial
  Chemically synthesized
cacuuucuguagcaaauga

SEQ ID NO: 21947 - RNA, 19 nt, artificial
  Chemically synthesized
agauggagagccgcuuuga

SEQ ID NO: 21948 - RNA, 19 nt, artificial
  Chemically synthesized
cucaaggucuauaucaaga

SEQ ID NO: 21949 - RNA, 19 nt, artificial
  Chemically synthesized
agaccacccgaagaaugua

SEQ ID NO: 21950 - RNA, 19 nt, artificial
  Chemically synthesized
ccacuacauugccaucaug

SEQ ID NO: 21951 - RNA, 19 nt, artificial
  Chemically synthesized
cuuuggcuuugcuaccagu

SEQ ID NO: 21952 - RNA, 19 nt, artificial
  Chemically synthesized
guuccauaugaugagaaau

SEQ ID NO: 21953 - RNA, 19 nt, artificial
  Chemically synthesized
gcaaaugacugugaauuac

SEQ ID NO: 21954 - RNA, 19 nt, artificial
  Chemically synthesized
guucaagugcagaaaucuu

SEQ ID NO: 21955 - RNA, 19 nt, artificial
  Chemically synthesized
aguucauugcacugacucu

SEQ ID NO: 21956 - RNA, 19 nt, artificial
  Chemically synthesized
cauaugaugagaaauaaac

SEQ ID NO: 21957 - RNA, 19 nt, artificial
  Chemically synthesized
uuaucucuagagaguuuga

SEQ ID NO: 21958 - RNA, 19 nt, artificial
  Chemically synthesized
acagugugugagaggagga

SEQ ID NO: 21959 - RNA, 19 nt, artificial
  Chemically synthesized
acaugcugugcuuugugga

SEQ ID NO: 21960 - RNA, 19 nt, artificial
  Chemically synthesized
gagaagaccacccgaagaa

SEQ ID NO: 21961 - RNA, 19 nt, artificial
  Chemically synthesized
caaacucagcgagaucaac

SEQ ID NO: 21962 - RNA, 19 nt, artificial
  Chemically synthesized
ugggcuugugugugaugug

SEQ ID NO: 21963 - RNA, 19 nt, artificial
  Chemically synthesized
gauaugaugacuaugauua

SEQ ID NO: 21964 - RNA, 19 nt, artificial
  Chemically synthesized
acuugccauucacccauca

SEQ ID NO: 21965 - RNA, 19 nt, artificial
  Chemically synthesized
cauuaccuccuacuugcca

SEQ ID NO: 21966 - RNA, 19 nt, artificial
  Chemically synthesized
cauucacccaucaauguga

SEQ ID NO: 21967 - RNA, 19 nt, artificial
  Chemically synthesized
guagggagugguauccagu

SEQ ID NO: 21968 - RNA, 19 nt, artificial
  Chemically synthesized
gauuuucuugcaagaucag

SEQ ID NO: 21969 - RNA, 19 nt, artificial
  Chemically synthesized
aagcggauuuucuugcaag

SEQ ID NO: 21970 - RNA, 19 nt, artificial
  Chemically synthesized
aaacucagcgagaucaaca

SEQ ID NO: 21971 - RNA, 19 nt, artificial
  Chemically synthesized
gauuucauuaccuccuacu

SEQ ID NO: 21972 - RNA, 19 nt, artificial
  Chemically synthesized
cuacuuucggauaugagga

SEQ ID NO: 21973 - RNA, 19 nt, artificial
  Chemically synthesized
caugcuuaauggugugagg

SEQ ID NO: 21974 - RNA, 19 nt, artificial
  Chemically synthesized
ucagcgagaucaacaaguu

SEQ ID NO: 21975 - RNA, 19 nt, artificial
  Chemically synthesized
guauuagauuauaaauccu

SEQ ID NO: 21976 - RNA, 19 nt, artificial
  Chemically synthesized
gagaagcugcgcaaacuca

SEQ ID NO: 21977 - RNA, 19 nt, artificial
  Chemically synthesized
aaauccucuuuauuuuggu

SEQ ID NO: 21978 - RNA, 19 nt, artificial
  Chemically synthesized
acaugaccugacuccugag

SEQ ID NO: 21979 - RNA, 19 nt, artificial
  Chemically synthesized
auuagauuauaaauccucu

SEQ ID NO: 21980 - RNA, 19 nt, artificial
  Chemically synthesized
acauccaggccuugcugaa

SEQ ID NO: 21981 - RNA, 19 nt, artificial
  Chemically synthesized
uggagaagucagagagccu

SEQ ID NO: 21982 - RNA, 19 nt, artificial
  Chemically synthesized
augugaugacuguaaaugu

SEQ ID NO: 21983 - RNA, 19 nt, artificial
  Chemically synthesized
cagcgagaucaacaaguug

SEQ ID NO: 21984 - RNA, 19 nt, artificial
  Chemically synthesized
acaauaccaucgccaugca

SEQ ID NO: 21985 - RNA, 19 nt, artificial
  Chemically synthesized
ugaggacuucacucggaga

SEQ ID NO: 21986 - RNA, 19 nt, artificial
  Chemically synthesized
ucacauugccuucugaaga

SEQ ID NO: 21987 - RNA, 19 nt, artificial
  Chemically synthesized
cugucauuuccagauuuca

SEQ ID NO: 21988 - RNA, 19 nt, artificial
  Chemically synthesized
agccuuugcuggucacauu

SEQ ID NO: 21989 - RNA, 19 nt, artificial
  Chemically synthesized
acuggaauggacaguucau

SEQ ID NO: 21990 - RNA, 19 nt, artificial
  Chemically synthesized
acuuggagauccuaaggga

SEQ ID NO: 21991 - RNA, 19 nt, artificial
  Chemically synthesized
aggagagggagaauucugu

SEQ ID NO: 21992 - RNA, 19 nt, artificial
  Chemically synthesized
gaauguacaaccucuucug

SEQ ID NO: 21993 - RNA, 19 nt, artificial
  Chemically synthesized
gggcuuaaguggguugcuu

SEQ ID NO: 21994 - RNA, 19 nt, artificial
  Chemically synthesized
gaaagucagggucacagcu

SEQ ID NO: 21995 - RNA, 19 nt, artificial
  Chemically synthesized
ucuagagggcaugugauga

SEQ ID NO: 21996 - RNA, 19 nt, artificial
  Chemically synthesized
gaagaggagggaguauuag

SEQ ID NO: 21997 - RNA, 19 nt, artificial
  Chemically synthesized
aauaccaucgccaugcaca

SEQ ID NO: 21998 - RNA, 19 nt, artificial
  Chemically synthesized
cuauauccacugcgucuuu

SEQ ID NO: 21999 - RNA, 19 nt, artificial
  Chemically synthesized
auggcucaucaccaaggaa

SEQ ID NO: 22000 - RNA, 19 nt, artificial
  Chemically synthesized
ucagagaagguccacguga

SEQ ID NO: 22001 - RNA, 19 nt, artificial
  Chemically synthesized
uggaagagcacuuggagau

SEQ ID NO: 22002 - RNA, 19 nt, artificial
  Chemically synthesized
agacccuacuuucggauau

SEQ ID NO: 22003 - RNA, 19 nt, artificial
  Chemically synthesized
auuucauuaccuccuacuu

SEQ ID NO: 22004 - RNA, 19 nt, artificial
  Chemically synthesized
cuuuguggaagacccuacu

SEQ ID NO: 22005 - RNA, 19 nt, artificial
  Chemically synthesized
ugcuuuguggaagacccua

SEQ ID NO: 22006 - RNA, 19 nt, artificial
  Chemically synthesized
auuaccuccuacuugccau

SEQ ID NO: 22007 - RNA, 19 nt, artificial
  Chemically synthesized
cuuuugugucccaugccca

SEQ ID NO: 22008 - RNA, 19 nt, artificial
  Chemically synthesized
gugcuuuguggaagacccu

SEQ ID NO: 22009 - RNA, 19 nt, artificial
  Chemically synthesized
aaaguugagccuuucuaga

SEQ ID NO: 22010 - RNA, 19 nt, artificial
  Chemically synthesized
aaacguucgcugagguuuu

SEQ ID NO: 22011 - RNA, 19 nt, artificial
  Chemically synthesized
ccuacuuucggauaugagg

SEQ ID NO: 22012 - RNA, 19 nt, artificial
  Chemically synthesized
auaccaucgccaugcacag

SEQ ID NO: 22013 - RNA, 19 nt, artificial
  Chemically synthesized
agagaagaccacccgaaga

SEQ ID NO: 22014 - RNA, 19 nt, artificial
  Chemically synthesized
ccucaaggucuauaucaag

SEQ ID NO: 22015 - RNA, 19 nt, artificial
  Chemically synthesized
auucacccaucaaugugaa

SEQ ID NO: 22016 - RNA, 19 nt, artificial
  Chemically synthesized
caauaccaucgccaugcac

SEQ ID NO: 22017 - RNA, 19 nt, artificial
  Chemically synthesized
auuccaggcacuuucugua

SEQ ID NO: 22018 - RNA, 19 nt, artificial
  Chemically synthesized
caucaaugugaaagucagg

SEQ ID NO: 22019 - RNA, 19 nt, artificial
  Chemically synthesized
aauccuaguucaguuuuuu

SEQ ID NO: 22020 - RNA, 19 nt, artificial
  Chemically synthesized
aagccacacccucccuuuu

SEQ ID NO: 22021 - RNA, 19 nt, artificial
  Chemically synthesized
uauccaguguucaagugca

SEQ ID NO: 22022 - RNA, 19 nt, artificial
  Chemically synthesized
acuuccgccacucagagaa

SEQ ID NO: 22023 - RNA, 19 nt, artificial
  Chemically synthesized
guuucugcagacugguggu

SEQ ID NO: 22024 - RNA, 19 nt, artificial
  Chemically synthesized
aguguuguggccuuccuga

SEQ ID NO: 22025 - RNA, 19 nt, artificial
  Chemically synthesized
uucugaagaggagggagua

SEQ ID NO: 22026 - RNA, 19 nt, artificial
  Chemically synthesized
gaugagaaguuccaggcag

SEQ ID NO: 22027 - RNA, 19 nt, artificial
  Chemically synthesized
cuacauugccaaaccucug

SEQ ID NO: 22028 - RNA, 19 nt, artificial
  Chemically synthesized
gcuuugagcuggagaaguc

SEQ ID NO: 22029 - RNA, 19 nt, artificial
  Chemically synthesized
uuccauaugaugagaaaua

SEQ ID NO: 22030 - RNA, 19 nt, artificial
  Chemically synthesized
ugguauccaguguucaagu

SEQ ID NO: 22031 - RNA, 19 nt, artificial
  Chemically synthesized
gccaagcucggaauuaaug

SEQ ID NO: 22032 - RNA, 19 nt, artificial
  Chemically synthesized
acacccucccuuuuccuca

SEQ ID NO: 22033 - RNA, 19 nt, artificial
  Chemically synthesized
cuacaauaccaucgccaug

SEQ ID NO: 22034 - RNA, 19 nt, artificial
  Chemically synthesized
ucagauaugaugacuauga

SEQ ID NO: 22035 - RNA, 19 nt, artificial
  Chemically synthesized
aguuugagccuuugcuggu

SEQ ID NO: 22036 - RNA, 19 nt, artificial
  Chemically synthesized
auggcuacucgcugaucca

SEQ ID NO: 22037 - RNA, 19 nt, artificial
  Chemically synthesized
acaaccuggcaguggugau

SEQ ID NO: 22038 - RNA, 19 nt, artificial
  Chemically synthesized
auaugaugagaaauaaacg

SEQ ID NO: 22039 - RNA, 19 nt, artificial
  Chemically synthesized
agugggcuugugugugaug

SEQ ID NO: 22040 - RNA, 19 nt, artificial
  Chemically synthesized
ugaugacuaugauuauggg

SEQ ID NO: 22041 - RNA, 19 nt, artificial
  Chemically synthesized
uaugaggacuucacucgga

SEQ ID NO: 22042 - RNA, 19 nt, artificial
  Chemically synthesized
gcucaucaccaaggaacac

SEQ ID NO: 22043 - RNA, 19 nt, artificial
  Chemically synthesized
aguugagccuuucuagaug

SEQ ID NO: 22044 - RNA, 19 nt, artificial
  Chemically synthesized
gaguauuagauuauaaauc

SEQ ID NO: 22045 - RNA, 19 nt, artificial
  Chemically synthesized
uggagggcacugaagaaag

SEQ ID NO: 22046 - RNA, 19 nt, artificial
  Chemically synthesized
gcaccaggguucuuguuug

SEQ ID NO: 22047 - RNA, 19 nt, artificial
  Chemically synthesized
cuaaaagccuguucuguug

SEQ ID NO: 22048 - RNA, 19 nt, artificial
  Chemically synthesized
aguuuggagggcacugaag

SEQ ID NO: 22049 - RNA, 19 nt, artificial
  Chemically synthesized
aaguugagccuuucuagau

SEQ ID NO: 22050 - RNA, 19 nt, artificial
  Chemically synthesized
uucggauaugaggacuuca

SEQ ID NO: 22051 - RNA, 19 nt, artificial
  Chemically synthesized
cuacaugaccugacuccug

SEQ ID NO: 22052 - RNA, 19 nt, artificial
  Chemically synthesized
uggaauggacaguucauug

SEQ ID NO: 22053 - RNA, 19 nt, artificial
  Chemically synthesized
uuugcuaccaguuccauau

SEQ ID NO: 22054 - RNA, 19 nt, artificial
  Chemically synthesized
ggaagagcacuuggagauc

SEQ ID NO: 22055 - RNA, 19 nt, artificial
  Chemically synthesized
aaguuccaggcagccuaua

SEQ ID NO: 22056 - RNA, 19 nt, artificial
  Chemically synthesized
aaaucuuuggcuuugcuac

SEQ ID NO: 22057 - RNA, 19 nt, artificial
  Chemically synthesized
ucugaagaggagggaguau

SEQ ID NO: 22058 - RNA, 19 nt, artificial
  Chemically synthesized
gaaauaaacguucgcugag

SEQ ID NO: 22059 - RNA, 19 nt, artificial
  Chemically synthesized
aacagcaagcggauuuucu

SEQ ID NO: 22060 - RNA, 19 nt, artificial
  Chemically synthesized
uuucuugcaagaucaggga

SEQ ID NO: 22061 - RNA, 19 nt, artificial
  Chemically synthesized
uaugaugagaaauaaacgu

SEQ ID NO: 22062 - RNA, 19 nt, artificial
  Chemically synthesized
cucucugaccaguuuggag

SEQ ID NO: 22063 - RNA, 19 nt, artificial
  Chemically synthesized
ucaagugcagaaaucuuug

SEQ ID NO: 22064 - RNA, 19 nt, artificial
  Chemically synthesized
acauggccgaguuucugca

SEQ ID NO: 22065 - RNA, 19 nt, artificial
  Chemically synthesized
gucacauugccuucugaag

SEQ ID NO: 22066 - RNA, 19 nt, artificial
  Chemically synthesized
gaugagaaauaaacguucg

SEQ ID NO: 22067 - RNA, 19 nt, artificial
  Chemically synthesized
cuaccaguuccauaugaug

SEQ ID NO: 22068 - RNA, 19 nt, artificial
  Chemically synthesized
uuggagggcacugaagaaa

SEQ ID NO: 22069 - RNA, 19 nt, artificial
  Chemically synthesized
uucuguagcaaaugacugu

SEQ ID NO: 22070 - RNA, 19 nt, artificial
  Chemically synthesized
uuagauuauaaauccucuu

SEQ ID NO: 22071 - RNA, 19 nt, artificial
  Chemically synthesized
cacaaugucugaagcugcc

SEQ ID NO: 22072 - RNA, 19 nt, artificial
  Chemically synthesized
gaguuugagccuuugcugg

SEQ ID NO: 22073 - RNA, 19 nt, artificial
  Chemically synthesized
aauguucacugggugggua

SEQ ID NO: 22074 - RNA, 19 nt, artificial
  Chemically synthesized
cauugccuucugaagagga

SEQ ID NO: 22075 - RNA, 19 nt, artificial
  Chemically synthesized
caaaugacugugaauuacg

SEQ ID NO: 22076 - RNA, 19 nt, artificial
  Chemically synthesized
ccuaguucaguuuuuugac

SEQ ID NO: 22077 - RNA, 19 nt, artificial
  Chemically synthesized
ccucucugaccaguuugga

SEQ ID NO: 22078 - RNA, 19 nt, artificial
  Chemically synthesized
uacauugccaaaccucuga

SEQ ID NO: 22079 - RNA, 19 nt, artificial
  Chemically synthesized
cuguugcccgaauccuagu

SEQ ID NO: 22080 - RNA, 19 nt, artificial
  Chemically synthesized
acuuccgaggccgugaaaa

SEQ ID NO: 22081 - RNA, 19 nt, artificial
  Chemically synthesized
aagcagccaaggaccgauu

SEQ ID NO: 22082 - RNA, 19 nt, artificial
  Chemically synthesized
augucucccaaaaaguuga

SEQ ID NO: 22083 - RNA, 19 nt, artificial
  Chemically synthesized
cuugugugugaugugcagu

SEQ ID NO: 22084 - RNA, 19 nt, artificial
  Chemically synthesized
cuuuggcaucagauaugau

SEQ ID NO: 22085 - RNA, 19 nt, artificial
  Chemically synthesized
uguucaagugcagaaaucu

SEQ ID NO: 22086 - RNA, 19 nt, artificial
  Chemically synthesized
cucccuuuuccucacugga

SEQ ID NO: 22087 - RNA, 19 nt, artificial
  Chemically synthesized
ucuccaugcuuaauggugu

SEQ ID NO: 22088 - RNA, 19 nt, artificial
  Chemically synthesized
uagagaguuugagccuuug

SEQ ID NO: 22089 - RNA, 19 nt, artificial
  Chemically synthesized
gaggagagggagaauucug

SEQ ID NO: 22090 - RNA, 19 nt, artificial
  Chemically synthesized
accacccgaagaauguaca

SEQ ID NO: 22091 - RNA, 19 nt, artificial
  Chemically synthesized
uggagauccuaagggacca

SEQ ID NO: 22092 - RNA, 19 nt, artificial
  Chemically synthesized
gcacccugacuacuuuacc

SEQ ID NO: 22093 - RNA, 19 nt, artificial
  Chemically synthesized
cucaucaccaaggaacaca

SEQ ID NO: 22094 - RNA, 19 nt, artificial
  Chemically synthesized
ccacaaugucugaagcugc

SEQ ID NO: 22095 - RNA, 19 nt, artificial
  Chemically synthesized
gaagguccacgugaacuug

SEQ ID NO: 22096 - RNA, 19 nt, artificial
  Chemically synthesized
caaggacuucucugucugg

SEQ ID NO: 22097 - RNA, 19 nt, artificial
  Chemically synthesized
uagagggcaugugaugacu

SEQ ID NO: 22098 - RNA, 19 nt, artificial
  Chemically synthesized
aggacuucucugucuggag

SEQ ID NO: 22099 - RNA, 19 nt, artificial
  Chemically synthesized
uugagcuggagaagucaga

SEQ ID NO: 22100 - RNA, 19 nt, artificial
  Chemically synthesized
gaacuauauccacugcguc

SEQ ID NO: 22101 - RNA, 19 nt, artificial
  Chemically synthesized
agcuggagaagucagagag

SEQ ID NO: 22102 - RNA, 19 nt, artificial
  Chemically synthesized
ccuuuuccucacuggaaug

SEQ ID NO: 22103 - RNA, 19 nt, artificial
  Chemically synthesized
auggccgaguuucugcaga

SEQ ID NO: 22104 - RNA, 19 nt, artificial
  Chemically synthesized
aaaaguugagccuuucuag

SEQ ID NO: 22105 - RNA, 19 nt, artificial
  Chemically synthesized
agaagcugcgcaaacucag

SEQ ID NO: 22106 - RNA, 19 nt, artificial
  Chemically synthesized
gauuccaggcacuuucugu

SEQ ID NO: 22107 - RNA, 19 nt, artificial
  Chemically synthesized
gacuguaaauguucacugg

SEQ ID NO: 22108 - RNA, 19 nt, artificial
  Chemically synthesized
uccaguguucaagugcaga

SEQ ID NO: 22109 - RNA, 19 nt, artificial
  Chemically synthesized
cuucugaagaggagggagu

SEQ ID NO: 22110 - RNA, 19 nt, artificial
  Chemically synthesized
acuuucuguagcaaaugac

SEQ ID NO: 22111 - RNA, 19 nt, artificial
  Chemically synthesized
aaggugugcaggagagaag

SEQ ID NO: 22112 - RNA, 19 nt, artificial
  Chemically synthesized
aagaaggugugcaggagag

SEQ ID NO: 22113 - RNA, 19 nt, artificial
  Chemically synthesized
caucaccaaggaacacauc

SEQ ID NO: 22114 - RNA, 19 nt, artificial
  Chemically synthesized
gcagaaaucuuuggcuuug

SEQ ID NO: 22115 - RNA, 19 nt, artificial
  Chemically synthesized
uucucuugcccuucuucua

SEQ ID NO: 22116 - RNA, 19 nt, artificial
  Chemically synthesized
cuugagguuccaaccugga

SEQ ID NO: 22117 - RNA, 19 nt, artificial
  Chemically synthesized
gcucuccuccuucguguuu

SEQ ID NO: 22118 - RNA, 19 nt, artificial
  Chemically synthesized
uauuuugguccuuuaugcu

SEQ ID NO: 22119 - RNA, 19 nt, artificial
  Chemically synthesized
uucacccaucaaugugaaa

SEQ ID NO: 22120 - RNA, 19 nt, artificial
  Chemically synthesized
gaguuucugcagacuggug

SEQ ID NO: 22121 - RNA, 19 nt, artificial
  Chemically synthesized
uguccaguucccuaaaagc

SEQ ID NO: 22122 - RNA, 19 nt, artificial
  Chemically synthesized
guucgcugagguuuuguuu

SEQ ID NO: 22123 - RNA, 19 nt, artificial
  Chemically synthesized
aauaaacguucgcugaggu

SEQ ID NO: 22124 - RNA, 19 nt, artificial
  Chemically synthesized
ugugaauuacgacuucucu

SEQ ID NO: 22125 - RNA, 19 nt, artificial
  Chemically synthesized
aacuauauccacugcgucu

SEQ ID NO: 22126 - RNA, 19 nt, artificial
  Chemically synthesized
acucagcgagaucaacaag

SEQ ID NO: 22127 - RNA, 19 nt, artificial
  Chemically synthesized
aaggacuucucugucugga

SEQ ID NO: 22128 - RNA, 19 nt, artificial
  Chemically synthesized
aucuggaacuauauccacu

SEQ ID NO: 22129 - RNA, 19 nt, artificial
  Chemically synthesized
aaauguucacugggugggu

SEQ ID NO: 22130 - RNA, 19 nt, artificial
  Chemically synthesized
agugugccacauuaaauac

SEQ ID NO: 22131 - RNA, 19 nt, artificial
  Chemically synthesized
uagacaaccuggcaguggu

SEQ ID NO: 22132 - RNA, 19 nt, artificial
  Chemically synthesized
aguuccaggcagccuauag

SEQ ID NO: 22133 - RNA, 19 nt, artificial
  Chemically synthesized
agaagucagagagccugcu

SEQ ID NO: 22134 - RNA, 19 nt, artificial
  Chemically synthesized
ucguguuuggcuguggcau

SEQ ID NO: 22135 - RNA, 19 nt, artificial
  Chemically synthesized
ucuccuccuucguguuugg

SEQ ID NO: 22136 - RNA, 19 nt, artificial
  Chemically synthesized
acucagagaagguccacgu

SEQ ID NO: 22137 - RNA, 19 nt, artificial
  Chemically synthesized
uuaauggugugaggcguca

SEQ ID NO: 22138 - RNA, 19 nt, artificial
  Chemically synthesized
gcuggaugagaaguuccag

SEQ ID NO: 22139 - RNA, 19 nt, artificial
  Chemically synthesized
agggcacugaagaaaggca

SEQ ID NO: 22140 - RNA, 19 nt, artificial
  Chemically synthesized
uuccgggcccaggauuaua

SEQ ID NO: 22141 - RNA, 19 nt, artificial
  Chemically synthesized
agaguuugagccuuugcug

SEQ ID NO: 22142 - RNA, 19 nt, artificial
  Chemically synthesized
uggguucuagagggcaugu

SEQ ID NO: 22143 - RNA, 19 nt, artificial
  Chemically synthesized
augagaaguuccaggcagc

SEQ ID NO: 22144 - RNA, 19 nt, artificial
  Chemically synthesized
ugagcuggagaagucagag

SEQ ID NO: 22145 - RNA, 19 nt, artificial
  Chemically synthesized
gagauccuaagggaccaca

SEQ ID NO: 22146 - RNA, 19 nt, artificial
  Chemically synthesized
caguucccuaaaagccugu

SEQ ID NO: 22147 - RNA, 19 nt, artificial
  Chemically synthesized
agagaagguccacgugaac

SEQ ID NO: 22148 - RNA, 19 nt, artificial
  Chemically synthesized
ugugaaagucagggucaca

SEQ ID NO: 22149 - RNA, 19 nt, artificial
  Chemically synthesized
uguggaagacccuacuuuc

SEQ ID NO: 22150 - RNA, 19 nt, artificial
  Chemically synthesized
aguauuagauuauaaaucc

SEQ ID NO: 22151 - RNA, 19 nt, artificial
  Chemically synthesized
aauuaaugugccacaagug

SEQ ID NO: 22152 - RNA, 19 nt, artificial
  Chemically synthesized
cagcaagcggauuuucuug

SEQ ID NO: 22153 - RNA, 19 nt, artificial
  Chemically synthesized
ucccuaaaagccuguucug

SEQ ID NO: 22154 - RNA, 19 nt, artificial
  Chemically synthesized
agacaugcugugcuuugug

SEQ ID NO: 22155 - RNA, 19 nt, artificial
  Chemically synthesized
cuacauugccaucauggcu

SEQ ID NO: 22156 - RNA, 19 nt, artificial
  Chemically synthesized
uguacaaccucuucuggag

SEQ ID NO: 22157 - RNA, 19 nt, artificial
  Chemically synthesized
augaggacuucacucggag

SEQ ID NO: 22158 - RNA, 19 nt, artificial
  Chemically synthesized
caacagcaagcggauuuuc

SEQ ID NO: 22159 - RNA, 19 nt, artificial
  Chemically synthesized
auuaaugugccacaagugu

SEQ ID NO: 22160 - RNA, 19 nt, artificial
  Chemically synthesized
augaccugacuccugagca

SEQ ID NO: 22161 - RNA, 19 nt, artificial
  Chemically synthesized
gacugugaauuacgacuuc

SEQ ID NO: 22162 - RNA, 19 nt, artificial
  Chemically synthesized
augacugugaauuacgacu

SEQ ID NO: 22163 - RNA, 19 nt, artificial
  Chemically synthesized
ccagacaugcugugcuuug

SEQ ID NO: 22164 - RNA, 19 nt, artificial
  Chemically synthesized
gguauccaguguucaagug

SEQ ID NO: 22165 - RNA, 19 nt, artificial
  Chemically synthesized
aaugacugugaauuacgac

SEQ ID NO: 22166 - RNA, 19 nt, artificial
  Chemically synthesized
aaugugaaagucaggguca

SEQ ID NO: 22167 - RNA, 19 nt, artificial
  Chemically synthesized
cacaaggacuucucugucu

SEQ ID NO: 22168 - RNA, 19 nt, artificial
  Chemically synthesized
uaaugugccacaaguguug

SEQ ID NO: 22169 - RNA, 19 nt, artificial
  Chemically synthesized
uauagccucaccuacaaua

SEQ ID NO: 22170 - RNA, 19 nt, artificial
  Chemically synthesized
uuaaugugccacaaguguu

SEQ ID NO: 22171 - RNA, 19 nt, artificial
  Chemically synthesized
ccucaccuacaauaccauc

SEQ ID NO: 22172 - RNA, 19 nt, artificial
  Chemically synthesized
uaccaguuccauaugauga

SEQ ID NO: 22173 - RNA, 19 nt, artificial
  Chemically synthesized
ucauugcacugacucuggg

SEQ ID NO: 22174 - RNA, 19 nt, artificial
  Chemically synthesized
aacacauccaggccuugcu

SEQ ID NO: 22175 - RNA, 19 nt, artificial
  Chemically synthesized
ugaaagucagggucacagc

SEQ ID NO: 22176 - RNA, 19 nt, artificial
  Chemically synthesized
ggagugguauccaguguuc

SEQ ID NO: 22177 - RNA, 19 nt, artificial
  Chemically synthesized
aggaggagagggagaauuc

SEQ ID NO: 22178 - RNA, 19 nt, artificial
  Chemically synthesized
uccaguucccuaaaagccu

SEQ ID NO: 22179 - RNA, 19 nt, artificial
  Chemically synthesized
aagagcacuuggagauccu

SEQ ID NO: 22180 - RNA, 19 nt, artificial
  Chemically synthesized
ugcuacccagagaagacca

SEQ ID NO: 22181 - RNA, 19 nt, artificial
  Chemically synthesized
cauuuccagauuucauuac

SEQ ID NO: 22182 - RNA, 19 nt, artificial
  Chemically synthesized
cgacuucucuugcccuucu

SEQ ID NO: 22183 - RNA, 19 nt, artificial
  Chemically synthesized
agagggcaugugaugacug

SEQ ID NO: 22184 - RNA, 19 nt, artificial
  Chemically synthesized
uagcaaaugacugugaauu

SEQ ID NO: 22185 - RNA, 19 nt, artificial
  Chemically synthesized
gacaugcugugcuuugugg

SEQ ID NO: 22186 - RNA, 19 nt, artificial
  Chemically synthesized
guucuuaccugguaggcuc

SEQ ID NO: 22187 - RNA, 19 nt, artificial
  Chemically synthesized
aggauuauaccugggaaga

SEQ ID NO: 22188 - RNA, 19 nt, artificial
  Chemically synthesized
cacuacauugccaucaugg

SEQ ID NO: 22189 - RNA, 19 nt, artificial
  Chemically synthesized
uugcuuccaggcagaagca

SEQ ID NO: 22190 - RNA, 19 nt, artificial
  Chemically synthesized
auugcacugacucugggau

SEQ ID NO: 22191 - RNA, 19 nt, artificial
  Chemically synthesized
aauggacaguucauugcac

SEQ ID NO: 22192 - RNA, 19 nt, artificial
  Chemically synthesized
augaugagaaauaaacguu

SEQ ID NO: 22193 - RNA, 19 nt, artificial
  Chemically synthesized
ucuuuggcaucagauauga

SEQ ID NO: 22194 - RNA, 19 nt, artificial
  Chemically synthesized
uaaguggguugcuuccagg

SEQ ID NO: 22195 - RNA, 19 nt, artificial
  Chemically synthesized
guuguggccuuccugaacu

SEQ ID NO: 22196 - RNA, 19 nt, artificial
  Chemically synthesized
uuggcaucagauaugauga

SEQ ID NO: 22197 - RNA, 19 nt, artificial
  Chemically synthesized
auaaauccucuuuauuuug

SEQ ID NO: 22198 - RNA, 19 nt, artificial
  Chemically synthesized
gaugucucccaaaaaguug

SEQ ID NO: 22199 - RNA, 19 nt, artificial
  Chemically synthesized
caagugcagaaaucuuugg

SEQ ID NO: 22200 - RNA, 19 nt, artificial
  Chemically synthesized
cuccuacuugccauucacc

SEQ ID NO: 22201 - RNA, 19 nt, artificial
  Chemically synthesized
gacccuuuugugucccaug

SEQ ID NO: 22202 - RNA, 19 nt, artificial
  Chemically synthesized
caccaggguucuuguuugg

SEQ ID NO: 22203 - RNA, 19 nt, artificial
  Chemically synthesized
ugcaagaaggugugcagga

SEQ ID NO: 22204 - RNA, 19 nt, artificial
  Chemically synthesized
acuucucugucuggagaca

SEQ ID NO: 22205 - RNA, 19 nt, artificial
  Chemically synthesized
aagacccuacuuucggaua

SEQ ID NO: 22206 - RNA, 19 nt, artificial
  Chemically synthesized
uuucauuaccuccuacuug

SEQ ID NO: 22207 - RNA, 19 nt, artificial
  Chemically synthesized
auggacaguucauugcacu

SEQ ID NO: 22208 - RNA, 19 nt, artificial
  Chemically synthesized
auguacaaccucuucugga

SEQ ID NO: 22209 - RNA, 19 nt, artificial
  Chemically synthesized
uucuagagggcaugugaug

SEQ ID NO: 22210 - RNA, 19 nt, artificial
  Chemically synthesized
uuauuuugguccuuuaugc

SEQ ID NO: 22211 - RNA, 19 nt, artificial
  Chemically synthesized
cuuccuuugcccuuuuucc

SEQ ID NO: 22212 - RNA, 19 nt, artificial
  Chemically synthesized
auuauaccugggaagacca

SEQ ID NO: 22213 - RNA, 19 nt, artificial
  Chemically synthesized
caucuggaacuauauccac

SEQ ID NO: 22214 - RNA, 19 nt, artificial
  Chemically synthesized
cuuaaguggguugcuucca

SEQ ID NO: 22215 - RNA, 19 nt, artificial
  Chemically synthesized
uuuaugcuugagguuccaa

SEQ ID NO: 22216 - RNA, 19 nt, artificial
  Chemically synthesized
caucaguguucuuaccugg

SEQ ID NO: 22217 - RNA, 19 nt, artificial
  Chemically synthesized
cccuuuuucccuuuucucc

SEQ ID NO: 22218 - RNA, 19 nt, artificial
  Chemically synthesized
uugcccgaauccuaguuca

SEQ ID NO: 22219 - RNA, 19 nt, artificial
  Chemically synthesized
aucuggguucuagagggca

SEQ ID NO: 22220 - RNA, 19 nt, artificial
  Chemically synthesized
agaucaacaaguugcuggc

SEQ ID NO: 22221 - RNA, 19 nt, artificial
  Chemically synthesized
auccaggccuugcugaaga

SEQ ID NO: 22222 - RNA, 19 nt, artificial
  Chemically synthesized
aaggaacacauccaggccu

SEQ ID NO: 22223 - RNA, 19 nt, artificial
  Chemically synthesized
gcacuuggagauccuaagg

SEQ ID NO: 22224 - RNA, 19 nt, artificial
  Chemically synthesized
gugccacauuaaauacccg

SEQ ID NO: 22225 - RNA, 19 nt, artificial
  Chemically synthesized
ugccauucacccaucaaug

SEQ ID NO: 22226 - RNA, 19 nt, artificial
  Chemically synthesized
auuuugguccuuuaugcuu

SEQ ID NO: 22227 - RNA, 19 nt, artificial
  Chemically synthesized
uucauuaccuccuacuugc

SEQ ID NO: 22228 - RNA, 19 nt, artificial
  Chemically synthesized
aagaccacccgaagaaugu

SEQ ID NO: 22229 - RNA, 19 nt, artificial
  Chemically synthesized
accucuucuggaggcacuu

SEQ ID NO: 22230 - RNA, 19 nt, artificial
  Chemically synthesized
ucuagauggcuuagguggc

SEQ ID NO: 22231 - RNA, 19 nt, artificial
  Chemically synthesized
aguuuuuugacuuccuuug

SEQ ID NO: 22232 - RNA, 19 nt, artificial
  Chemically synthesized
cauugccaaaccucugacu

SEQ ID NO: 22233 - RNA, 19 nt, artificial
  Chemically synthesized
gcuuaaguggguugcuucc

SEQ ID NO: 22234 - RNA, 19 nt, artificial
  Chemically synthesized
accaggguucuuguuugga

SEQ ID NO: 22235 - RNA, 19 nt, artificial
  Chemically synthesized
agcucggaauuaaugugcc

SEQ ID NO: 22236 - RNA, 19 nt, artificial
  Chemically synthesized
aagccuguucuguugggca

SEQ ID NO: 22237 - RNA, 19 nt, artificial
  Chemically synthesized
ugagccuuugcuggucaca

SEQ ID NO: 22238 - RNA, 19 nt, artificial
  Chemically synthesized
agugcagaaaucuuuggcu

SEQ ID NO: 22239 - RNA, 19 nt, artificial
  Chemically synthesized
uccuuugcccuuuuucccu

SEQ ID NO: 22240 - RNA, 19 nt, artificial
  Chemically synthesized
uuaaguggguugcuuccag

SEQ ID NO: 22241 - RNA, 19 nt, artificial
  Chemically synthesized
auuucugcagccagugucu

SEQ ID NO: 22242 - RNA, 19 nt, artificial
  Chemically synthesized
uuuccagauuucauuaccu

SEQ ID NO: 22243 - RNA, 19 nt, artificial
  Chemically synthesized
gaccacccgaagaauguac

SEQ ID NO: 22244 - RNA, 19 nt, artificial
  Chemically synthesized
auaaacguucgcugagguu

SEQ ID NO: 22245 - RNA, 19 nt, artificial
  Chemically synthesized
uucguguuuggcuguggca

SEQ ID NO: 22246 - RNA, 19 nt, artificial
  Chemically synthesized
cccugacuacuuuaccagc

SEQ ID NO: 22247 - RNA, 19 nt, artificial
  Chemically synthesized
uuuugguccuuuaugcuug

SEQ ID NO: 22248 - RNA, 19 nt, artificial
  Chemically synthesized
gugaugacuguaaauguuc

SEQ ID NO: 22249 - RNA, 19 nt, artificial
  Chemically synthesized
uacuugccauucacccauc

SEQ ID NO: 22250 - RNA, 19 nt, artificial
  Chemically synthesized
uagggagugguauccagug

SEQ ID NO: 22251 - RNA, 19 nt, artificial
  Chemically synthesized
guucuuguuuggacccugc

SEQ ID NO: 22252 - RNA, 19 nt, artificial
  Chemically synthesized
ucuggaacuauauccacug

SEQ ID NO: 22253 - RNA, 19 nt, artificial
  Chemically synthesized
uucugcagacuggugguga

SEQ ID NO: 22254 - RNA, 19 nt, artificial
  Chemically synthesized
aaguguuguggccuuccug

SEQ ID NO: 22255 - RNA, 19 nt, artificial
  Chemically synthesized
guucauugcacugacucug

SEQ ID NO: 22256 - RNA, 19 nt, artificial
  Chemically synthesized
gacccguugaacaacucug

SEQ ID NO: 22257 - RNA, 19 nt, artificial
  Chemically synthesized
cucuagagaguuugagccu

SEQ ID NO: 22258 - RNA, 19 nt, artificial
  Chemically synthesized
uaugaugacuaugauuaug

SEQ ID NO: 22259 - RNA, 19 nt, artificial
  Chemically synthesized
auccaguguucaagugcag

SEQ ID NO: 22260 - RNA, 19 nt, artificial
  Chemically synthesized
uggacaguucauugcacug

SEQ ID NO: 22261 - RNA, 19 nt, artificial
  Chemically synthesized
cuccuucguguuuggcugu

SEQ ID NO: 22262 - RNA, 19 nt, artificial
  Chemically synthesized
cuuggagauccuaagggac

SEQ ID NO: 22263 - RNA, 19 nt, artificial
  Chemically synthesized
aauccucuuuauuuugguc

SEQ ID NO: 22264 - RNA, 19 nt, artificial
  Chemically synthesized
gaagaccacccgaagaaug

SEQ ID NO: 22265 - RNA, 19 nt, artificial
  Chemically synthesized
auaugaggacuucacucgg

SEQ ID NO: 22266 - RNA, 19 nt, artificial
  Chemically synthesized
cacugaagaaaggcaaggg

SEQ ID NO: 22267 - RNA, 19 nt, artificial
  Chemically synthesized
cuccucucugaccaguuug

SEQ ID NO: 22268 - RNA, 19 nt, artificial
  Chemically synthesized
uugugugugaugugcaguc

SEQ ID NO: 22269 - RNA, 19 nt, artificial
  Chemically synthesized
cauuaaauacccgugcagg

SEQ ID NO: 22270 - RNA, 19 nt, artificial
  Chemically synthesized
uuauaccugggaagaccau

SEQ ID NO: 22271 - RNA, 19 nt, artificial
  Chemically synthesized
guugagccuuucuagaugg

SEQ ID NO: 22272 - RNA, 19 nt, artificial
  Chemically synthesized
uuuugacuuccuuugcccu

SEQ ID NO: 22273 - RNA, 19 nt, artificial
  Chemically synthesized
auugccuucugaagaggag

SEQ ID NO: 22274 - RNA, 19 nt, artificial
  Chemically synthesized
acuacuuuaccagcuucug

SEQ ID NO: 22275 - RNA, 19 nt, artificial
  Chemically synthesized
ugugcuuuguggaagaccc

SEQ ID NO: 22276 - RNA, 19 nt, artificial
  Chemically synthesized
acccguugaacaacucugg

SEQ ID NO: 22277 - RNA, 19 nt, artificial
  Chemically synthesized
aucucuagagaguuugagc

SEQ ID NO: 22278 - RNA, 19 nt, artificial
  Chemically synthesized
aguguucuuaccugguagg

SEQ ID NO: 22279 - RNA, 19 nt, artificial
  Chemically synthesized
gaaccucaaggucuauauc

SEQ ID NO: 22280 - RNA, 19 nt, artificial
  Chemically synthesized
guucccuaaaagccuguuc

SEQ ID NO: 22281 - RNA, 19 nt, artificial
  Chemically synthesized
uuuggcuuugcuaccaguu

SEQ ID NO: 22282 - RNA, 19 nt, artificial
  Chemically synthesized
acauugccaucauggcugc

SEQ ID NO: 22283 - RNA, 19 nt, artificial
  Chemically synthesized
aaauaaacguucgcugagg

SEQ ID NO: 22284 - RNA, 19 nt, artificial
  Chemically synthesized
ggugaccauggcuacauug

SEQ ID NO: 22285 - RNA, 19 nt, artificial
  Chemically synthesized
cagcugcuggaugagaagu

SEQ ID NO: 22286 - RNA, 19 nt, artificial
  Chemically synthesized
uucccuaaaagccuguucu

SEQ ID NO: 22287 - RNA, 19 nt, artificial
  Chemically synthesized
agagcucaaggacuaccug

SEQ ID NO: 22288 - RNA, 19 nt, artificial
  Chemically synthesized
uugcuaccaguuccauaug

SEQ ID NO: 22289 - RNA, 19 nt, artificial
  Chemically synthesized
ucauuaccuccuacuugcc

SEQ ID NO: 22290 - RNA, 19 nt, artificial
  Chemically synthesized
gauuauaccugggaagacc

SEQ ID NO: 22291 - RNA, 19 nt, artificial
  Chemically synthesized
caggguucuuguuuggacc

SEQ ID NO: 22292 - RNA, 19 nt, artificial
  Chemically synthesized
guaaauguucacugggugg

SEQ ID NO: 22293 - RNA, 19 nt, artificial
  Chemically synthesized
gccaacagcaagcggauuu

SEQ ID NO: 22294 - RNA, 19 nt, artificial
  Chemically synthesized
ugccaacagcaagcggauu

SEQ ID NO: 22295 - RNA, 19 nt, artificial
  Chemically synthesized
acugcgucuuuggcaucag

SEQ ID NO: 22296 - RNA, 19 nt, artificial
  Chemically synthesized
aguagacaaccuggcagug

SEQ ID NO: 22297 - RNA, 19 nt, artificial
  Chemically synthesized
cuucucuugcccuucuucu

SEQ ID NO: 22298 - RNA, 19 nt, artificial
  Chemically synthesized
auccuaguucaguuuuuug

SEQ ID NO: 22299 - RNA, 19 nt, artificial
  Chemically synthesized
uaauggugugaggcgucag

SEQ ID NO: 22300 - RNA, 19 nt, artificial
  Chemically synthesized
ggucuauaucaagacagug

SEQ ID NO: 22301 - RNA, 19 nt, artificial
  Chemically synthesized
cuacuuuaccagcuucugg

SEQ ID NO: 22302 - RNA, 19 nt, artificial
  Chemically synthesized
uuuuccucacuggaaugga

SEQ ID NO: 22303 - RNA, 19 nt, artificial
  Chemically synthesized
ugggaagaccauggcuacu

SEQ ID NO: 22304 - RNA, 19 nt, artificial
  Chemically synthesized
uagauuauaaauccucuuu

SEQ ID NO: 22305 - RNA, 19 nt, artificial
  Chemically synthesized
cuuaauggugugaggcguc

SEQ ID NO: 22306 - RNA, 19 nt, artificial
  Chemically synthesized
cacccgaagaauguacaac

SEQ ID NO: 22307 - RNA, 19 nt, artificial
  Chemically synthesized
aaccucuucuggaggcacu

SEQ ID NO: 22308 - RNA, 19 nt, artificial
  Chemically synthesized
caguucauugcacugacuc

SEQ ID NO: 22309 - RNA, 19 nt, artificial
  Chemically synthesized
acccuuuugugucccaugc

SEQ ID NO: 22310 - RNA, 19 nt, artificial
  Chemically synthesized
uaaacguucgcugagguuu

SEQ ID NO: 22311 - RNA, 19 nt, artificial
  Chemically synthesized
uucccuuuucuccaugcuu

SEQ ID NO: 22312 - RNA, 19 nt, artificial
  Chemically synthesized
auguucacuggguggguag

SEQ ID NO: 22313 - RNA, 19 nt, artificial
  Chemically synthesized
ugcuggucacauugccuuc

SEQ ID NO: 22314 - RNA, 19 nt, artificial
  Chemically synthesized
aaccucaaggucuauauca

SEQ ID NO: 22315 - RNA, 19 nt, artificial
  Chemically synthesized
uuuauuuugguccuuuaug

SEQ ID NO: 22316 - RNA, 19 nt, artificial
  Chemically synthesized
acugacucugggaucucag

SEQ ID NO: 22317 - RNA, 19 nt, artificial
  Chemically synthesized
guuugagccuuugcugguc

SEQ ID NO: 22318 - RNA, 19 nt, artificial
  Chemically synthesized
agccuauagccucaccuac

SEQ ID NO: 22319 - RNA, 19 nt, artificial
  Chemically synthesized
agauccuaagggaccacac

SEQ ID NO: 22320 - RNA, 19 nt, artificial
  Chemically synthesized
gagagggagaauucuguuc

SEQ ID NO: 22321 - RNA, 19 nt, artificial
  Chemically synthesized
auggcuuagguggcaccau

SEQ ID NO: 22322 - RNA, 19 nt, artificial
  Chemically synthesized
cuuugcuggucacauugcc

SEQ ID NO: 22323 - RNA, 19 nt, artificial
  Chemically synthesized
acuuccuuugcccuuuuuc

SEQ ID NO: 22324 - RNA, 19 nt, artificial
  Chemically synthesized
uccacgugaacuugcugcu

SEQ ID NO: 22325 - RNA, 19 nt, artificial
  Chemically synthesized
gagaagguccacgugaacu

SEQ ID NO: 22326 - RNA, 19 nt, artificial
  Chemically synthesized
cucggaauuaaugugccac

SEQ ID NO: 22327 - RNA, 19 nt, artificial
  Chemically synthesized
aucccaguaucucaucugu

SEQ ID NO: 22328 - RNA, 19 nt, artificial
  Chemically synthesized
uuucuguagcaaaugacug

SEQ ID NO: 22329 - RNA, 19 nt, artificial
  Chemically synthesized
uccucacuggaauggacag

SEQ ID NO: 22330 - RNA, 19 nt, artificial
  Chemically synthesized
gaugacuguaaauguucac

SEQ ID NO: 22331 - RNA, 19 nt, artificial
  Chemically synthesized
uauuagauuauaaauccuc

SEQ ID NO: 22332 - RNA, 19 nt, artificial
  Chemically synthesized
caugugaugacuguaaaug

SEQ ID NO: 22333 - RNA, 19 nt, artificial
  Chemically synthesized
uaucucuagagaguuugag

SEQ ID NO: 22334 - RNA, 19 nt, artificial
  Chemically synthesized
guggaagacccuacuuucg

SEQ ID NO: 22335 - RNA, 19 nt, artificial
  Chemically synthesized
uuucuagauggcuuaggug

SEQ ID NO: 22336 - RNA, 19 nt, artificial
  Chemically synthesized
uuuguggaagacccuacuu

SEQ ID NO: 22337 - RNA, 19 nt, artificial
  Chemically synthesized
ccuuugcuggucacauugc

SEQ ID NO: 22338 - RNA, 19 nt, artificial
  Chemically synthesized
aguucccuaaaagccuguu

SEQ ID NO: 22339 - RNA, 19 nt, artificial
  Chemically synthesized
ucuguagcaaaugacugug

SEQ ID NO: 22340 - RNA, 19 nt, artificial
  Chemically synthesized
aaagcccucccugcaagaa

SEQ ID NO: 22341 - RNA, 19 nt, artificial
  Chemically synthesized
acugaagaaaggcaagggc

SEQ ID NO: 22342 - RNA, 19 nt, artificial
  Chemically synthesized
guuuuuugacuuccuuugc

SEQ ID NO: 22343 - RNA, 19 nt, artificial
  Chemically synthesized
aucaguguucuuaccuggu

SEQ ID NO: 22344 - RNA, 19 nt, artificial
  Chemically synthesized
uaguucaguuuuuugacuu

SEQ ID NO: 22345 - RNA, 19 nt, artificial
  Chemically synthesized
gagaauucuguucucccag

SEQ ID NO: 22346 - RNA, 19 nt, artificial
  Chemically synthesized
aauguacaaccucuucugg

SEQ ID NO: 22347 - RNA, 19 nt, artificial
  Chemically synthesized
gaauuacgacuucucuugc

SEQ ID NO: 22348 - RNA, 19 nt, artificial
  Chemically synthesized
uccuacuugccauucaccc

SEQ ID NO: 22349 - RNA, 19 nt, artificial
  Chemically synthesized
uaaauccucuuuauuuugg

SEQ ID NO: 22350 - RNA, 19 nt, artificial
  Chemically synthesized
ugcccgaauccuaguucag

SEQ ID NO: 22351 - RNA, 19 nt, artificial
  Chemically synthesized
agagaguuugagccuuugc

SEQ ID NO: 22352 - RNA, 19 nt, artificial
  Chemically synthesized
caccuacaauaccaucgcc

SEQ ID NO: 22353 - RNA, 19 nt, artificial
  Chemically synthesized
auuuccagauuucauuacc

SEQ ID NO: 22354 - RNA, 19 nt, artificial
  Chemically synthesized
uccuccuucguguuuggcu

SEQ ID NO: 22355 - RNA, 19 nt, artificial
  Chemically synthesized
uccagauuucauuaccucc

SEQ ID NO: 22356 - RNA, 19 nt, artificial
  Chemically synthesized
augcacagugguguggaca

SEQ ID NO: 22357 - RNA, 19 nt, artificial
  Chemically synthesized
cuucuagcagucugugccu

SEQ ID NO: 22358 - RNA, 19 nt, artificial
  Chemically synthesized
uagccucaccuacaauacc

SEQ ID NO: 22359 - RNA, 19 nt, artificial
  Chemically synthesized
uuugagccuuugcugguca

SEQ ID NO: 22360 - RNA, 19 nt, artificial
  Chemically synthesized
acuacauugccaucauggc

SEQ ID NO: 22361 - RNA, 19 nt, artificial
  Chemically synthesized
acguucgcugagguuuugu

SEQ ID NO: 22362 - RNA, 19 nt, artificial
  Chemically synthesized
uguuguggccuuccugaac

SEQ ID NO: 22363 - RNA, 19 nt, artificial
  Chemically synthesized
cuuuucuccaugcuuaaug

SEQ ID NO: 22364 - RNA, 19 nt, artificial
  Chemically synthesized
uggcuuugcuaccaguucc

SEQ ID NO: 22365 - RNA, 19 nt, artificial
  Chemically synthesized
uuugacuuccuuugcccuu

SEQ ID NO: 22366 - RNA, 19 nt, artificial
  Chemically synthesized
uuuauaaucuaauacuccc

SEQ ID NO: 22367 - RNA, 19 nt, artificial
  Chemically synthesized
uuuauuucucaucauaugg

SEQ ID NO: 22368 - RNA, 19 nt, artificial
  Chemically synthesized
uucacguggaccuucucug

SEQ ID NO: 22369 - RNA, 19 nt, artificial
  Chemically synthesized
uuuacagucaucacaugcc

SEQ ID NO: 22370 - RNA, 19 nt, artificial
  Chemically synthesized
uuaauuccgagcuuggccc

SEQ ID NO: 22371 - RNA, 19 nt, artificial
  Chemically synthesized
ucacaugcccucuagaacc

SEQ ID NO: 22372 - RNA, 19 nt, artificial
  Chemically synthesized
auaaagaggauuuauaauc

SEQ ID NO: 22373 - RNA, 19 nt, artificial
  Chemically synthesized
auuuauaaucuaauacucc

SEQ ID NO: 22374 - RNA, 19 nt, artificial
  Chemically synthesized
uauaaucuaauacucccuc

SEQ ID NO: 22375 - RNA, 19 nt, artificial
  Chemically synthesized
uuuugggagacaucugcgg

SEQ ID NO: 22376 - RNA, 19 nt, artificial
  Chemically synthesized
uuauaaucuaauacucccu

SEQ ID NO: 22377 - RNA, 19 nt, artificial
  Chemically synthesized
uuacagucaucacaugccc

SEQ ID NO: 22378 - RNA, 19 nt, artificial
  Chemically synthesized
uaauacucccuccucuuca

SEQ ID NO: 22379 - RNA, 19 nt, artificial
  Chemically synthesized
uucacagucauuugcuaca

SEQ ID NO: 22380 - RNA, 19 nt, artificial
  Chemically synthesized
ucguaauucacagucauuu

SEQ ID NO: 22381 - RNA, 19 nt, artificial
  Chemically synthesized
aucauagucaucauaucug

SEQ ID NO: 22382 - RNA, 19 nt, artificial
  Chemically synthesized
uucgggacugcacaucaca

SEQ ID NO: 22383 - RNA, 19 nt, artificial
  Chemically synthesized
uucuuuccugugcccucug

SEQ ID NO: 22384 - RNA, 19 nt, artificial
  Chemically synthesized
auuugcuacagaaagugcc

SEQ ID NO: 22385 - RNA, 19 nt, artificial
  Chemically synthesized
uugaacacuggauaccacu

SEQ ID NO: 22386 - RNA, 19 nt, artificial
  Chemically synthesized
ucuucucuccugcacaccu

SEQ ID NO: 22387 - RNA, 19 nt, artificial
  Chemically synthesized
aaaguagucagggugcagg

SEQ ID NO: 22388 - RNA, 19 nt, artificial
  Chemically synthesized
uuguugaucucgcugaguu

SEQ ID NO: 22389 - RNA, 19 nt, artificial
  Chemically synthesized
aucauauggaacugguagc

SEQ ID NO: 22390 - RNA, 19 nt, artificial
  Chemically synthesized
uccuuggugaugagccaug

SEQ ID NO: 22391 - RNA, 19 nt, artificial
  Chemically synthesized
uucucuccugcacaccuuc

SEQ ID NO: 22392 - RNA, 19 nt, artificial
  Chemically synthesized
uuauuucucaucauaugga

SEQ ID NO: 22393 - RNA, 19 nt, artificial
  Chemically synthesized
uuccacaaagcacagcaug

SEQ ID NO: 22394 - RNA, 19 nt, artificial
  Chemically synthesized
uaauucacagucauuugcu

SEQ ID NO: 22395 - RNA, 19 nt, artificial
  Chemically synthesized
uauggaacugguagcaaag

SEQ ID NO: 22396 - RNA, 19 nt, artificial
  Chemically synthesized
ugggugaauggcaaguagg

SEQ ID NO: 22397 - RNA, 19 nt, artificial
  Chemically synthesized
uaggagguaaugaaaucug

SEQ ID NO: 22398 - RNA, 19 nt, artificial
  Chemically synthesized
ucuccaagugcucuuccag

SEQ ID NO: 22399 - RNA, 19 nt, artificial
  Chemically synthesized
uaaucuaauacucccuccu

SEQ ID NO: 22400 - RNA, 19 nt, artificial
  Chemically synthesized
auaaucuaauacucccucc

SEQ ID NO: 22401 - RNA, 19 nt, artificial
  Chemically synthesized
ucuccugcacaccuucuug

SEQ ID NO: 22402 - RNA, 19 nt, artificial
  Chemically synthesized
uaaaggaccaaaauaaaga

SEQ ID NO: 22403 - RNA, 19 nt, artificial
  Chemically synthesized
ucuaauacucccuccucuu

SEQ ID NO: 22404 - RNA, 19 nt, artificial
  Chemically synthesized
uuguaggugaggcuauagg

SEQ ID NO: 22405 - RNA, 19 nt, artificial
  Chemically synthesized
ugcaaugaacuguccauuc

SEQ ID NO: 22406 - RNA, 19 nt, artificial
  Chemically synthesized
aucacaugcccucuagaac

SEQ ID NO: 22407 - RNA, 19 nt, artificial
  Chemically synthesized
uagggaacuggacacacag

SEQ ID NO: 22408 - RNA, 19 nt, artificial
  Chemically synthesized
ucuucagugcccuccaaac

SEQ ID NO: 22409 - RNA, 19 nt, artificial
  Chemically synthesized
auaaucauagucaucauau

SEQ ID NO: 22410 - RNA, 19 nt, artificial
  Chemically synthesized
auaaaggaccaaaauaaag

SEQ ID NO: 22411 - RNA, 19 nt, artificial
  Chemically synthesized
uggagaaaagggaaaaagg

SEQ ID NO: 22412 - RNA, 19 nt, artificial
  Chemically synthesized
agagguuuggcaauguagc

SEQ ID NO: 22413 - RNA, 19 nt, artificial
  Chemically synthesized
uucuucagugcccuccaaa

SEQ ID NO: 22414 - RNA, 19 nt, artificial
  Chemically synthesized
ucucaucauauggaacugg

SEQ ID NO: 22415 - RNA, 19 nt, artificial
  Chemically synthesized
uagcaaagccaaagauuuc

SEQ ID NO: 22416 - RNA, 19 nt, artificial
  Chemically synthesized
agucauuugcuacagaaag

SEQ ID NO: 22417 - RNA, 19 nt, artificial
  Chemically synthesized
augaaaucuggaaaugaca

SEQ ID NO: 22418 - RNA, 19 nt, artificial
  Chemically synthesized
ucccagagucagugcaaug

SEQ ID NO: 22419 - RNA, 19 nt, artificial
  Chemically synthesized
ugacuucuccagcucaaag

SEQ ID NO: 22420 - RNA, 19 nt, artificial
  Chemically synthesized
aaacuggucagagaggagg

SEQ ID NO: 22421 - RNA, 19 nt, artificial
  Chemically synthesized
uagcaggccacugucuuga

SEQ ID NO: 22422 - RNA, 19 nt, artificial
  Chemically synthesized
uugaugggugaauggcaag

SEQ ID NO: 22423 - RNA, 19 nt, artificial
  Chemically synthesized
acagucaucacaugcccuc

SEQ ID NO: 22424 - RNA, 19 nt, artificial
  Chemically synthesized
uacagucaucacaugcccu

SEQ ID NO: 22425 - RNA, 19 nt, artificial
  Chemically synthesized
uguggcagucagagguuug

SEQ ID NO: 22426 - RNA, 19 nt, artificial
  Chemically synthesized
uauaguuccagauggcccu

SEQ ID NO: 22427 - RNA, 19 nt, artificial
  Chemically synthesized
aaucuaauacucccuccuc

SEQ ID NO: 22428 - RNA, 19 nt, artificial
  Chemically synthesized
aaaggcucaaacucucuag

SEQ ID NO: 22429 - RNA, 19 nt, artificial
  Chemically synthesized
uaaugaaaucuggaaauga

SEQ ID NO: 22430 - RNA, 19 nt, artificial
  Chemically synthesized
aaucauagucaucauaucu

SEQ ID NO: 22431 - RNA, 19 nt, artificial
  Chemically synthesized
aacagaauucucccucucc

SEQ ID NO: 22432 - RNA, 19 nt, artificial
  Chemically synthesized
ugcuacagaaagugccugg

SEQ ID NO: 22433 - RNA, 19 nt, artificial
  Chemically synthesized
uaaagaggauuuauaaucu

SEQ ID NO: 22434 - RNA, 19 nt, artificial
  Chemically synthesized
uucaggaaggccacaacac

SEQ ID NO: 22435 - RNA, 19 nt, artificial
  Chemically synthesized
ucagcgaacguuuauuucu

SEQ ID NO: 22436 - RNA, 19 nt, artificial
  Chemically synthesized
ugaacuguccauuccagug

SEQ ID NO: 22437 - RNA, 19 nt, artificial
  Chemically synthesized
ucaagcauaaaggaccaaa

SEQ ID NO: 22438 - RNA, 19 nt, artificial
  Chemically synthesized
ugaacacuggauaccacuc

SEQ ID NO: 22439 - RNA, 19 nt, artificial
  Chemically synthesized
ucucuccugcacaccuucu

SEQ ID NO: 22440 - RNA, 19 nt, artificial
  Chemically synthesized
aacauuuacagucaucaca

SEQ ID NO: 22441 - RNA, 19 nt, artificial
  Chemically synthesized
accuaagccaucuagaaag

SEQ ID NO: 22442 - RNA, 19 nt, artificial
  Chemically synthesized
aggagucaggucauguagc

SEQ ID NO: 22443 - RNA, 19 nt, artificial
  Chemically synthesized
acuuuuugggagacaucug

SEQ ID NO: 22444 - RNA, 19 nt, artificial
  Chemically synthesized
uggaaccucaagcauaaag

SEQ ID NO: 22445 - RNA, 19 nt, artificial
  Chemically synthesized
ucaggagucaggucaugua

SEQ ID NO: 22446 - RNA, 19 nt, artificial
  Chemically synthesized
ucauuugcuacagaaagug

SEQ ID NO: 22447 - RNA, 19 nt, artificial
  Chemically synthesized
ucaaagcggcucuccaucu

SEQ ID NO: 22448 - RNA, 19 nt, artificial
  Chemically synthesized
ucuugauauagaccuugag

SEQ ID NO: 22449 - RNA, 19 nt, artificial
  Chemically synthesized
uacauucuucggguggucu

SEQ ID NO: 22450 - RNA, 19 nt, artificial
  Chemically synthesized
caugauggcaauguagugg

SEQ ID NO: 22451 - RNA, 19 nt, artificial
  Chemically synthesized
acugguagcaaagccaaag

SEQ ID NO: 22452 - RNA, 19 nt, artificial
  Chemically synthesized
auuucucaucauauggaac

SEQ ID NO: 22453 - RNA, 19 nt, artificial
  Chemically synthesized
guaauucacagucauuugc

SEQ ID NO: 22454 - RNA, 19 nt, artificial
  Chemically synthesized
aagauuucugcacuugaac

SEQ ID NO: 22455 - RNA, 19 nt, artificial
  Chemically synthesized
agagucagugcaaugaacu

SEQ ID NO: 22456 - RNA, 19 nt, artificial
  Chemically synthesized
guuuauuucucaucauaug

SEQ ID NO: 22457 - RNA, 19 nt, artificial
  Chemically synthesized
ucaaacucucuagagauaa

SEQ ID NO: 22458 - RNA, 19 nt, artificial
  Chemically synthesized
uccuccucucacacacugu

SEQ ID NO: 22459 - RNA, 19 nt, artificial
  Chemically synthesized
uccacaaagcacagcaugu

SEQ ID NO: 22460 - RNA, 19 nt, artificial
  Chemically synthesized
uucuucggguggucuucuc

SEQ ID NO: 22461 - RNA, 19 nt, artificial
  Chemically synthesized
guugaucucgcugaguuug

SEQ ID NO: 22462 - RNA, 19 nt, artificial
  Chemically synthesized
cacaucacacacaagccca

SEQ ID NO: 22463 - RNA, 19 nt, artificial
  Chemically synthesized
uaaucauagucaucauauc

SEQ ID NO: 22464 - RNA, 19 nt, artificial
  Chemically synthesized
ugaugggugaauggcaagu

SEQ ID NO: 22465 - RNA, 19 nt, artificial
  Chemically synthesized
uggcaaguaggagguaaug

SEQ ID NO: 22466 - RNA, 19 nt, artificial
  Chemically synthesized
ucacauugaugggugaaug

SEQ ID NO: 22467 - RNA, 19 nt, artificial
  Chemically synthesized
acuggauaccacucccuac

SEQ ID NO: 22468 - RNA, 19 nt, artificial
  Chemically synthesized
cugaucuugcaagaaaauc

SEQ ID NO: 22469 - RNA, 19 nt, artificial
  Chemically synthesized
cuugcaagaaaauccgcuu

SEQ ID NO: 22470 - RNA, 19 nt, artificial
  Chemically synthesized
uguugaucucgcugaguuu

SEQ ID NO: 22471 - RNA, 19 nt, artificial
  Chemically synthesized
aguaggagguaaugaaauc

SEQ ID NO: 22472 - RNA, 19 nt, artificial
  Chemically synthesized
uccucauauccgaaaguag

SEQ ID NO: 22473 - RNA, 19 nt, artificial
  Chemically synthesized
ccucacaccauuaagcaug

SEQ ID NO: 22474 - RNA, 19 nt, artificial
  Chemically synthesized
aacuuguugaucucgcuga

SEQ ID NO: 22475 - RNA, 19 nt, artificial
  Chemically synthesized
aggauuuauaaucuaauac

SEQ ID NO: 22476 - RNA, 19 nt, artificial
  Chemically synthesized
ugaguuugcgcagcuucuc

SEQ ID NO: 22477 - RNA, 19 nt, artificial
  Chemically synthesized
accaaaauaaagaggauuu

SEQ ID NO: 22478 - RNA, 19 nt, artificial
  Chemically synthesized
cucaggagucaggucaugu

SEQ ID NO: 22479 - RNA, 19 nt, artificial
  Chemically synthesized
agaggauuuauaaucuaau

SEQ ID NO: 22480 - RNA, 19 nt, artificial
  Chemically synthesized
uucagcaaggccuggaugu

SEQ ID NO: 22481 - RNA, 19 nt, artificial
  Chemically synthesized
aggcucucugacuucucca

SEQ ID NO: 22482 - RNA, 19 nt, artificial
  Chemically synthesized
acauuuacagucaucacau

SEQ ID NO: 22483 - RNA, 19 nt, artificial
  Chemically synthesized
caacuuguugaucucgcug

SEQ ID NO: 22484 - RNA, 19 nt, artificial
  Chemically synthesized
ugcauggcgaugguauugu

SEQ ID NO: 22485 - RNA, 19 nt, artificial
  Chemically synthesized
ucuccgagugaaguccuca

SEQ ID NO: 22486 - RNA, 19 nt, artificial
  Chemically synthesized
ucuucagaaggcaauguga

SEQ ID NO: 22487 - RNA, 19 nt, artificial
  Chemically synthesized
ugaaaucuggaaaugacag

SEQ ID NO: 22488 - RNA, 19 nt, artificial
  Chemically synthesized
aaugugaccagcaaaggcu

SEQ ID NO: 22489 - RNA, 19 nt, artificial
  Chemically synthesized
augaacuguccauuccagu

SEQ ID NO: 22490 - RNA, 19 nt, artificial
  Chemically synthesized
ucccuuaggaucuccaagu

SEQ ID NO: 22491 - RNA, 19 nt, artificial
  Chemically synthesized
acagaauucucccucuccu

SEQ ID NO: 22492 - RNA, 19 nt, artificial
  Chemically synthesized
cagaagagguuguacauuc

SEQ ID NO: 22493 - RNA, 19 nt, artificial
  Chemically synthesized
aagcaacccacuuaagccc

SEQ ID NO: 22494 - RNA, 19 nt, artificial
  Chemically synthesized
agcugugacccugacuuuc

SEQ ID NO: 22495 - RNA, 19 nt, artificial
  Chemically synthesized
ucaucacaugcccucuaga

SEQ ID NO: 22496 - RNA, 19 nt, artificial
  Chemically synthesized
cuaauacucccuccucuuc

SEQ ID NO: 22497 - RNA, 19 nt, artificial
  Chemically synthesized
ugugcauggcgaugguauu

SEQ ID NO: 22498 - RNA, 19 nt, artificial
  Chemically synthesized
aaagacgcaguggauauag

SEQ ID NO: 22499 - RNA, 19 nt, artificial
  Chemically synthesized
uuccuuggugaugagccau

SEQ ID NO: 22500 - RNA, 19 nt, artificial
  Chemically synthesized
ucacguggaccuucucuga

SEQ ID NO: 22501 - RNA, 19 nt, artificial
  Chemically synthesized
aucuccaagugcucuucca

SEQ ID NO: 22502 - RNA, 19 nt, artificial
  Chemically synthesized
auauccgaaaguagggucu

SEQ ID NO: 22503 - RNA, 19 nt, artificial
  Chemically synthesized
aaguaggagguaaugaaau

SEQ ID NO: 22504 - RNA, 19 nt, artificial
  Chemically synthesized
aguagggucuuccacaaag

SEQ ID NO: 22505 - RNA, 19 nt, artificial
  Chemically synthesized
uagggucuuccacaaagca

SEQ ID NO: 22506 - RNA, 19 nt, artificial
  Chemically synthesized
auggcaaguaggagguaau

SEQ ID NO: 22507 - RNA, 19 nt, artificial
  Chemically synthesized
ugggcaugggacacaaaag

SEQ ID NO: 22508 - RNA, 19 nt, artificial
  Chemically synthesized
agggucuuccacaaagcac

SEQ ID NO: 22509 - RNA, 19 nt, artificial
  Chemically synthesized
ucuagaaaggcucaacuuu

SEQ ID NO: 22510 - RNA, 19 nt, artificial
  Chemically synthesized
aaaaccucagcgaacguuu

SEQ ID NO: 22511 - RNA, 19 nt, artificial
  Chemically synthesized
ccucauauccgaaaguagg

SEQ ID NO: 22512 - RNA, 19 nt, artificial
  Chemically synthesized
cugugcauggcgaugguau

SEQ ID NO: 22513 - RNA, 19 nt, artificial
  Chemically synthesized
ucuucggguggucuucucu

SEQ ID NO: 22514 - RNA, 19 nt, artificial
  Chemically synthesized
cuugauauagaccuugagg

SEQ ID NO: 22515 - RNA, 19 nt, artificial
  Chemically synthesized
uucacauugaugggugaau

SEQ ID NO: 22516 - RNA, 19 nt, artificial
  Chemically synthesized
gugcauggcgaugguauug

SEQ ID NO: 22517 - RNA, 19 nt, artificial
  Chemically synthesized
uacagaaagugccuggaau

SEQ ID NO: 22518 - RNA, 19 nt, artificial
  Chemically synthesized
ccugacuuucacauugaug

SEQ ID NO: 22519 - RNA, 19 nt, artificial
  Chemically synthesized
aaaaaacugaacuaggauu

SEQ ID NO: 22520 - RNA, 19 nt, artificial
  Chemically synthesized
aaaagggaggguguggcuu

SEQ ID NO: 22521 - RNA, 19 nt, artificial
  Chemically synthesized
ugcacuugaacacuggaua

SEQ ID NO: 22522 - RNA, 19 nt, artificial
  Chemically synthesized
uucucugaguggcggaagu

SEQ ID NO: 22523 - RNA, 19 nt, artificial
  Chemically synthesized
accaccagucugcagaaac

SEQ ID NO: 22524 - RNA, 19 nt, artificial
  Chemically synthesized
ucaggaaggccacaacacu

SEQ ID NO: 22525 - RNA, 19 nt, artificial
  Chemically synthesized
uacucccuccucuucagaa

SEQ ID NO: 22526 - RNA, 19 nt, artificial
  Chemically synthesized
cugccuggaacuucucauc

SEQ ID NO: 22527 - RNA, 19 nt, artificial
  Chemically synthesized
cagagguuuggcaauguag

SEQ ID NO: 22528 - RNA, 19 nt, artificial
  Chemically synthesized
gacuucuccagcucaaagc

SEQ ID NO: 22529 - RNA, 19 nt, artificial
  Chemically synthesized
uauuucucaucauauggaa

SEQ ID NO: 22530 - RNA, 19 nt, artificial
  Chemically synthesized
acuugaacacuggauacca

SEQ ID NO: 22531 - RNA, 19 nt, artificial
  Chemically synthesized
cauuaauuccgagcuuggc

SEQ ID NO: 22532 - RNA, 19 nt, artificial
  Chemically synthesized
ugaggaaaagggagggugu

SEQ ID NO: 22533 - RNA, 19 nt, artificial
  Chemically synthesized
cauggcgaugguauuguag

SEQ ID NO: 22534 - RNA, 19 nt, artificial
  Chemically synthesized
ucauagucaucauaucuga

SEQ ID NO: 22535 - RNA, 19 nt, artificial
  Chemically synthesized
accagcaaaggcucaaacu

SEQ ID NO: 22536 - RNA, 19 nt, artificial
  Chemically synthesized
uggaucagcgaguagccau

SEQ ID NO: 22537 - RNA, 19 nt, artificial
  Chemically synthesized
aucaccacugccagguugu

SEQ ID NO: 22538 - RNA, 19 nt, artificial
  Chemically synthesized
cguuuauuucucaucauau

SEQ ID NO: 22539 - RNA, 19 nt, artificial
  Chemically synthesized
caucacacacaagcccacu

SEQ ID NO: 22540 - RNA, 19 nt, artificial
  Chemically synthesized
cccauaaucauagucauca

SEQ ID NO: 22541 - RNA, 19 nt, artificial
  Chemically synthesized
uccgagugaaguccucaua

SEQ ID NO: 22542 - RNA, 19 nt, artificial
  Chemically synthesized
guguuccuuggugaugagc

SEQ ID NO: 22543 - RNA, 19 nt, artificial
  Chemically synthesized
caucuagaaaggcucaacu

SEQ ID NO: 22544 - RNA, 19 nt, artificial
  Chemically synthesized
gauuuauaaucuaauacuc

SEQ ID NO: 22545 - RNA, 19 nt, artificial
  Chemically synthesized
cuuucuucagugcccucca

SEQ ID NO: 22546 - RNA, 19 nt, artificial
  Chemically synthesized
caaacaagaacccuggugc

SEQ ID NO: 22547 - RNA, 19 nt, artificial
  Chemically synthesized
caacagaacaggcuuuuag

SEQ ID NO: 22548 - RNA, 19 nt, artificial
  Chemically synthesized
cuucagugcccuccaaacu

SEQ ID NO: 22549 - RNA, 19 nt, artificial
  Chemically synthesized
aucuagaaaggcucaacuu

SEQ ID NO: 22550 - RNA, 19 nt, artificial
  Chemically synthesized
ugaaguccucauauccgaa

SEQ ID NO: 22551 - RNA, 19 nt, artificial
  Chemically synthesized
caggagucaggucauguag

SEQ ID NO: 22552 - RNA, 19 nt, artificial
  Chemically synthesized
caaugaacuguccauucca

SEQ ID NO: 22553 - RNA, 19 nt, artificial
  Chemically synthesized
auauggaacugguagcaaa

SEQ ID NO: 22554 - RNA, 19 nt, artificial
  Chemically synthesized
gaucuccaagugcucuucc

SEQ ID NO: 22555 - RNA, 19 nt, artificial
  Chemically synthesized
uauaggcugccuggaacuu

SEQ ID NO: 22556 - RNA, 19 nt, artificial
  Chemically synthesized
guagcaaagccaaagauuu

SEQ ID NO: 22557 - RNA, 19 nt, artificial
  Chemically synthesized
auacucccuccucuucaga

SEQ ID NO: 22558 - RNA, 19 nt, artificial
  Chemically synthesized
cucagcgaacguuuauuuc

SEQ ID NO: 22559 - RNA, 19 nt, artificial
  Chemically synthesized
agaaaauccgcuugcuguu

SEQ ID NO: 22560 - RNA, 19 nt, artificial
  Chemically synthesized
ucccugaucuugcaagaaa

SEQ ID NO: 22561 - RNA, 19 nt, artificial
  Chemically synthesized
acguuuauuucucaucaua

SEQ ID NO: 22562 - RNA, 19 nt, artificial
  Chemically synthesized
cuccaaacuggucagagag

SEQ ID NO: 22563 - RNA, 19 nt, artificial
  Chemically synthesized
caaagauuucugcacuuga

SEQ ID NO: 22564 - RNA, 19 nt, artificial
  Chemically synthesized
ugcagaaacucggccaugu

SEQ ID NO: 22565 - RNA, 19 nt, artificial
  Chemically synthesized
cuucagaaggcaaugugac

SEQ ID NO: 22566 - RNA, 19 nt, artificial
  Chemically synthesized
cgaacguuuauuucucauc

SEQ ID NO: 22567 - RNA, 19 nt, artificial
  Chemically synthesized
caucauauggaacugguag

SEQ ID NO: 22568 - RNA, 19 nt, artificial
  Chemically synthesized
uuucuucagugcccuccaa

SEQ ID NO: 22569 - RNA, 19 nt, artificial
  Chemically synthesized
acagucauuugcuacagaa

SEQ ID NO: 22570 - RNA, 19 nt, artificial
  Chemically synthesized
aagaggauuuauaaucuaa

SEQ ID NO: 22571 - RNA, 19 nt, artificial
  Chemically synthesized
ggcagcuucagacauugug

SEQ ID NO: 22572 - RNA, 19 nt, artificial
  Chemically synthesized
ccagcaaaggcucaaacuc

SEQ ID NO: 22573 - RNA, 19 nt, artificial
  Chemically synthesized
uacccacccagugaacauu

SEQ ID NO: 22574 - RNA, 19 nt, artificial
  Chemically synthesized
uccucuucagaaggcaaug

SEQ ID NO: 22575 - RNA, 19 nt, artificial
  Chemically synthesized
cguaauucacagucauuug

SEQ ID NO: 22576 - RNA, 19 nt, artificial
  Chemically synthesized
gucaaaaaacugaacuagg

SEQ ID NO: 22577 - RNA, 19 nt, artificial
  Chemically synthesized
uccaaacuggucagagagg

SEQ ID NO: 22578 - RNA, 19 nt, artificial
  Chemically synthesized
ucagagguuuggcaaugua

SEQ ID NO: 22579 - RNA, 19 nt, artificial
  Chemically synthesized
acuaggauucgggcaacag

SEQ ID NO: 22580 - RNA, 19 nt, artificial
  Chemically synthesized
uuuucacggccucggaagu

SEQ ID NO: 22581 - RNA, 19 nt, artificial
  Chemically synthesized
aaucgguccuuggcugcuu

SEQ ID NO: 22582 - RNA, 19 nt, artificial
  Chemically synthesized
ucaacuuuuugggagacau

SEQ ID NO: 22583 - RNA, 19 nt, artificial
  Chemically synthesized
acugcacaucacacacaag

SEQ ID NO: 22584 - RNA, 19 nt, artificial
  Chemically synthesized
aucauaucugaugccaaag

SEQ ID NO: 22585 - RNA, 19 nt, artificial
  Chemically synthesized
agauuucugcacuugaaca

SEQ ID NO: 22586 - RNA, 19 nt, artificial
  Chemically synthesized
uccagugaggaaaagggag

SEQ ID NO: 22587 - RNA, 19 nt, artificial
  Chemically synthesized
acaccauuaagcauggaga

SEQ ID NO: 22588 - RNA, 19 nt, artificial
  Chemically synthesized
caaaggcucaaacucucua

SEQ ID NO: 22589 - RNA, 19 nt, artificial
  Chemically synthesized
cagaauucucccucuccuc

SEQ ID NO: 22590 - RNA, 19 nt, artificial
  Chemically synthesized
uguacauucuucggguggu

SEQ ID NO: 22591 - RNA, 19 nt, artificial
  Chemically synthesized
uggucccuuaggaucucca

SEQ ID NO: 22592 - RNA, 19 nt, artificial
  Chemically synthesized
gguaaaguagucagggugc

SEQ ID NO: 22593 - RNA, 19 nt, artificial
  Chemically synthesized
uguguuccuuggugaugag

SEQ ID NO: 22594 - RNA, 19 nt, artificial
  Chemically synthesized
gcagcuucagacauugugg

SEQ ID NO: 22595 - RNA, 19 nt, artificial
  Chemically synthesized
caaguucacguggaccuuc

SEQ ID NO: 22596 - RNA, 19 nt, artificial
  Chemically synthesized
ccagacagagaaguccuug

SEQ ID NO: 22597 - RNA, 19 nt, artificial
  Chemically synthesized
agucaucacaugcccucua

SEQ ID NO: 22598 - RNA, 19 nt, artificial
  Chemically synthesized
cuccagacagagaaguccu

SEQ ID NO: 22599 - RNA, 19 nt, artificial
  Chemically synthesized
ucugacuucuccagcucaa

SEQ ID NO: 22600 - RNA, 19 nt, artificial
  Chemically synthesized
gacgcaguggauauaguuc

SEQ ID NO: 22601 - RNA, 19 nt, artificial
  Chemically synthesized
cucucugacuucuccagcu

SEQ ID NO: 22602 - RNA, 19 nt, artificial
  Chemically synthesized
cauuccagugaggaaaagg

SEQ ID NO: 22603 - RNA, 19 nt, artificial
  Chemically synthesized
ucugcagaaacucggccau

SEQ ID NO: 22604 - RNA, 19 nt, artificial
  Chemically synthesized
cuagaaaggcucaacuuuu

SEQ ID NO: 22605 - RNA, 19 nt, artificial
  Chemically synthesized
cugaguuugcgcagcuucu

SEQ ID NO: 22606 - RNA, 19 nt, artificial
  Chemically synthesized
acagaaagugccuggaauc

SEQ ID NO: 22607 - RNA, 19 nt, artificial
  Chemically synthesized
ccagugaacauuuacaguc

SEQ ID NO: 22608 - RNA, 19 nt, artificial
  Chemically synthesized
ucugcacuugaacacugga

SEQ ID NO: 22609 - RNA, 19 nt, artificial
  Chemically synthesized
acucccuccucuucagaag

SEQ ID NO: 22610 - RNA, 19 nt, artificial
  Chemically synthesized
gucauuugcuacagaaagu

SEQ ID NO: 22611 - RNA, 19 nt, artificial
  Chemically synthesized
cuucucuccugcacaccuu

SEQ ID NO: 22612 - RNA, 19 nt, artificial
  Chemically synthesized
cucuccugcacaccuucuu

SEQ ID NO: 22613 - RNA, 19 nt, artificial
  Chemically synthesized
gauguguuccuuggugaug

SEQ ID NO: 22614 - RNA, 19 nt, artificial
  Chemically synthesized
caaagccaaagauuucugc

SEQ ID NO: 22615 - RNA, 19 nt, artificial
  Chemically synthesized
uagaagaagggcaagagaa

SEQ ID NO: 22616 - RNA, 19 nt, artificial
  Chemically synthesized
uccagguuggaaccucaag

SEQ ID NO: 22617 - RNA, 19 nt, artificial
  Chemically synthesized
aaacacgaaggaggagagc

SEQ ID NO: 22618 - RNA, 19 nt, artificial
  Chemically synthesized
agcauaaaggaccaaaaua

SEQ ID NO: 22619 - RNA, 19 nt, artificial
  Chemically synthesized
uuucacauugaugggugaa

SEQ ID NO: 22620 - RNA, 19 nt, artificial
  Chemically synthesized
caccagucugcagaaacuc

SEQ ID NO: 22621 - RNA, 19 nt, artificial
  Chemically synthesized
gcuuuuagggaacuggaca

SEQ ID NO: 22622 - RNA, 19 nt, artificial
  Chemically synthesized
aaacaaaaccucagcgaac

SEQ ID NO: 22623 - RNA, 19 nt, artificial
  Chemically synthesized
accucagcgaacguuuauu

SEQ ID NO: 22624 - RNA, 19 nt, artificial
  Chemically synthesized
agagaagucguaauucaca

SEQ ID NO: 22625 - RNA, 19 nt, artificial
  Chemically synthesized
agacgcaguggauauaguu

SEQ ID NO: 22626 - RNA, 19 nt, artificial
  Chemically synthesized
cuuguugaucucgcugagu

SEQ ID NO: 22627 - RNA, 19 nt, artificial
  Chemically synthesized
uccagacagagaaguccuu

SEQ ID NO: 22628 - RNA, 19 nt, artificial
  Chemically synthesized
aguggauauaguuccagau

SEQ ID NO: 22629 - RNA, 19 nt, artificial
  Chemically synthesized
acccacccagugaacauuu

SEQ ID NO: 22630 - RNA, 19 nt, artificial
  Chemically synthesized
guauuuaauguggcacacu

SEQ ID NO: 22631 - RNA, 19 nt, artificial
  Chemically synthesized
accacugccagguugucua

SEQ ID NO: 22632 - RNA, 19 nt, artificial
  Chemically synthesized
cuauaggcugccuggaacu

SEQ ID NO: 22633 - RNA, 19 nt, artificial
  Chemically synthesized
agcaggcucucugacuucu

SEQ ID NO: 22634 - RNA, 19 nt, artificial
  Chemically synthesized
augccacagccaaacacga

SEQ ID NO: 22635 - RNA, 19 nt, artificial
  Chemically synthesized
ccaaacacgaaggaggaga

SEQ ID NO: 22636 - RNA, 19 nt, artificial
  Chemically synthesized
acguggaccuucucugagu

SEQ ID NO: 22637 - RNA, 19 nt, artificial
  Chemically synthesized
ugacgccucacaccauuaa

SEQ ID NO: 22638 - RNA, 19 nt, artificial
  Chemically synthesized
cuggaacuucucauccagc

SEQ ID NO: 22639 - RNA, 19 nt, artificial
  Chemically synthesized
ugccuuucuucagugcccu

SEQ ID NO: 22640 - RNA, 19 nt, artificial
  Chemically synthesized
uauaauccugggcccggaa

SEQ ID NO: 22641 - RNA, 19 nt, artificial
  Chemically synthesized
cagcaaaggcucaaacucu

SEQ ID NO: 22642 - RNA, 19 nt, artificial
  Chemically synthesized
acaugcccucuagaaccca

SEQ ID NO: 22643 - RNA, 19 nt, artificial
  Chemically synthesized
gcugccuggaacuucucau

SEQ ID NO: 22644 - RNA, 19 nt, artificial
  Chemically synthesized
cucugacuucuccagcuca

SEQ ID NO: 22645 - RNA, 19 nt, artificial
  Chemically synthesized
uguggucccuuaggaucuc

SEQ ID NO: 22646 - RNA, 19 nt, artificial
  Chemically synthesized
acaggcuuuuagggaacug

SEQ ID NO: 22647 - RNA, 19 nt, artificial
  Chemically synthesized
guucacguggaccuucucu

SEQ ID NO: 22648 - RNA, 19 nt, artificial
  Chemically synthesized
ugugacccugacuuucaca

SEQ ID NO: 22649 - RNA, 19 nt, artificial
  Chemically synthesized
gaaaguagggucuuccaca

SEQ ID NO: 22650 - RNA, 19 nt, artificial
  Chemically synthesized
ggauuuauaaucuaauacu

SEQ ID NO: 22651 - RNA, 19 nt, artificial
  Chemically synthesized
cacuuguggcacauuaauu

SEQ ID NO: 22652 - RNA, 19 nt, artificial
  Chemically synthesized
caagaaaauccgcuugcug

SEQ ID NO: 22653 - RNA, 19 nt, artificial
  Chemically synthesized
cagaacaggcuuuuaggga

SEQ ID NO: 22654 - RNA, 19 nt, artificial
  Chemically synthesized
cacaaagcacagcaugucu

SEQ ID NO: 22655 - RNA, 19 nt, artificial
  Chemically synthesized
agccaugauggcaauguag

SEQ ID NO: 22656 - RNA, 19 nt, artificial
  Chemically synthesized
cuccagaagagguuguaca

SEQ ID NO: 22657 - RNA, 19 nt, artificial
  Chemically synthesized
cuccgagugaaguccucau

SEQ ID NO: 22658 - RNA, 19 nt, artificial
  Chemically synthesized
gaaaauccgcuugcuguug

SEQ ID NO: 22659 - RNA, 19 nt, artificial
  Chemically synthesized
acacuuguggcacauuaau

SEQ ID NO: 22660 - RNA, 19 nt, artificial
  Chemically synthesized
ugcucaggagucaggucau

SEQ ID NO: 22661 - RNA, 19 nt, artificial
  Chemically synthesized
gaagucguaauucacaguc

SEQ ID NO: 22662 - RNA, 19 nt, artificial
  Chemically synthesized
agucguaauucacagucau

SEQ ID NO: 22663 - RNA, 19 nt, artificial
  Chemically synthesized
caaagcacagcaugucugg

SEQ ID NO: 22664 - RNA, 19 nt, artificial
  Chemically synthesized
cacuugaacacuggauacc

SEQ ID NO: 22665 - RNA, 19 nt, artificial
  Chemically synthesized
gucguaauucacagucauu

SEQ ID NO: 22666 - RNA, 19 nt, artificial
  Chemically synthesized
ugacccugacuuucacauu

SEQ ID NO: 22667 - RNA, 19 nt, artificial
  Chemically synthesized
agacagagaaguccuugug

SEQ ID NO: 22668 - RNA, 19 nt, artificial
  Chemically synthesized
caacacuuguggcacauua

SEQ ID NO: 22669 - RNA, 19 nt, artificial
  Chemically synthesized
uauuguaggugaggcuaua

SEQ ID NO: 22670 - RNA, 19 nt, artificial
  Chemically synthesized
aacacuuguggcacauuaa

SEQ ID NO: 22671 - RNA, 19 nt, artificial
  Chemically synthesized
gaugguauuguaggugagg

SEQ ID NO: 22672 - RNA, 19 nt, artificial
  Chemically synthesized
ucaucauauggaacuggua

SEQ ID NO: 22673 - RNA, 19 nt, artificial
  Chemically synthesized
cccagagucagugcaauga

SEQ ID NO: 22674 - RNA, 19 nt, artificial
  Chemically synthesized
agcaaggccuggauguguu

SEQ ID NO: 22675 - RNA, 19 nt, artificial
  Chemically synthesized
gcugugacccugacuuuca

SEQ ID NO: 22676 - RNA, 19 nt, artificial
  Chemically synthesized
gaacacuggauaccacucc

SEQ ID NO: 22677 - RNA, 19 nt, artificial
  Chemically synthesized
gaauucucccucuccuccu

SEQ ID NO: 22678 - RNA, 19 nt, artificial
  Chemically synthesized
aggcuuuuagggaacugga

SEQ ID NO: 22679 - RNA, 19 nt, artificial
  Chemically synthesized
aggaucuccaagugcucuu

SEQ ID NO: 22680 - RNA, 19 nt, artificial
  Chemically synthesized
uggucuucucuggguagca

SEQ ID NO: 22681 - RNA, 19 nt, artificial
  Chemically synthesized
guaaugaaaucuggaaaug

SEQ ID NO: 22682 - RNA, 19 nt, artificial
  Chemically synthesized
agaagggcaagagaagucg

SEQ ID NO: 22683 - RNA, 19 nt, artificial
  Chemically synthesized
cagucaucacaugcccucu

SEQ ID NO: 22684 - RNA, 19 nt, artificial
  Chemically synthesized
aauucacagucauuugcua

SEQ ID NO: 22685 - RNA, 19 nt, artificial
  Chemically synthesized
ccacaaagcacagcauguc

SEQ ID NO: 22686 - RNA, 19 nt, artificial
  Chemically synthesized
gagccuaccagguaagaac

SEQ ID NO: 22687 - RNA, 19 nt, artificial
  Chemically synthesized
ucuucccagguauaauccu

SEQ ID NO: 22688 - RNA, 19 nt, artificial
  Chemically synthesized
ccaugauggcaauguagug

SEQ ID NO: 22689 - RNA, 19 nt, artificial
  Chemically synthesized
ugcuucugccuggaagcaa

SEQ ID NO: 22690 - RNA, 19 nt, artificial
  Chemically synthesized
aucccagagucagugcaau

SEQ ID NO: 22691 - RNA, 19 nt, artificial
  Chemically synthesized
gugcaaugaacuguccauu

SEQ ID NO: 22692 - RNA, 19 nt, artificial
  Chemically synthesized
aacguuuauuucucaucau

SEQ ID NO: 22693 - RNA, 19 nt, artificial
  Chemically synthesized
ucauaucugaugccaaaga

SEQ ID NO: 22694 - RNA, 19 nt, artificial
  Chemically synthesized
ccuggaagcaacccacuua

SEQ ID NO: 22695 - RNA, 19 nt, artificial
  Chemically synthesized
aguucaggaaggccacaac

SEQ ID NO: 22696 - RNA, 19 nt, artificial
  Chemically synthesized
ucaucauaucugaugccaa

SEQ ID NO: 22697 - RNA, 19 nt, artificial
  Chemically synthesized
caaaauaaagaggauuuau

SEQ ID NO: 22698 - RNA, 19 nt, artificial
  Chemically synthesized
caacuuuuugggagacauc

SEQ ID NO: 22699 - RNA, 19 nt, artificial
  Chemically synthesized
ccaaagauuucugcacuug

SEQ ID NO: 22700 - RNA, 19 nt, artificial
  Chemically synthesized
ggugaauggcaaguaggag

SEQ ID NO: 22701 - RNA, 19 nt, artificial
  Chemically synthesized
caugggacacaaaaggguc

SEQ ID NO: 22702 - RNA, 19 nt, artificial
  Chemically synthesized
ccaaacaagaacccuggug

SEQ ID NO: 22703 - RNA, 19 nt, artificial
  Chemically synthesized
uccugcacaccuucuugca

SEQ ID NO: 22704 - RNA, 19 nt, artificial
  Chemically synthesized
ugucuccagacagagaagu

SEQ ID NO: 22705 - RNA, 19 nt, artificial
  Chemically synthesized
uauccgaaaguagggucuu

SEQ ID NO: 22706 - RNA, 19 nt, artificial
  Chemically synthesized
caaguaggagguaaugaaa

SEQ ID NO: 22707 - RNA, 19 nt, artificial
  Chemically synthesized
agugcaaugaacuguccau

SEQ ID NO: 22708 - RNA, 19 nt, artificial
  Chemically synthesized
uccagaagagguuguacau

SEQ ID NO: 22709 - RNA, 19 nt, artificial
  Chemically synthesized
caucacaugcccucuagaa

SEQ ID NO: 22710 - RNA, 19 nt, artificial
  Chemically synthesized
gcauaaaggaccaaaauaa

SEQ ID NO: 22711 - RNA, 19 nt, artificial
  Chemically synthesized
ggaaaaagggcaaaggaag

SEQ ID NO: 22712 - RNA, 19 nt, artificial
  Chemically synthesized
uggucuucccagguauaau

SEQ ID NO: 22713 - RNA, 19 nt, artificial
  Chemically synthesized
guggauauaguuccagaug

SEQ ID NO: 22714 - RNA, 19 nt, artificial
  Chemically synthesized
uggaagcaacccacuuaag

SEQ ID NO: 22715 - RNA, 19 nt, artificial
  Chemically synthesized
uuggaaccucaagcauaaa

SEQ ID NO: 22716 - RNA, 19 nt, artificial
  Chemically synthesized
ccagguaagaacacugaug

SEQ ID NO: 22717 - RNA, 19 nt, artificial
  Chemically synthesized
ggagaaaagggaaaaaggg

SEQ ID NO: 22718 - RNA, 19 nt, artificial
  Chemically synthesized
ugaacuaggauucgggcaa

SEQ ID NO: 22719 - RNA, 19 nt, artificial
  Chemically synthesized
ugcccucuagaacccagau

SEQ ID NO: 22720 - RNA, 19 nt, artificial
  Chemically synthesized
gccagcaacuuguugaucu

SEQ ID NO: 22721 - RNA, 19 nt, artificial
  Chemically synthesized
ucuucagcaaggccuggau

SEQ ID NO: 22722 - RNA, 19 nt, artificial
  Chemically synthesized
aggccuggauguguuccuu

SEQ ID NO: 22723 - RNA, 19 nt, artificial
  Chemically synthesized
ccuuaggaucuccaagugc

SEQ ID NO: 22724 - RNA, 19 nt, artificial
  Chemically synthesized
cggguauuuaauguggcac

SEQ ID NO: 22725 - RNA, 19 nt, artificial
  Chemically synthesized
cauugaugggugaauggca

SEQ ID NO: 22726 - RNA, 19 nt, artificial
  Chemically synthesized
aagcauaaaggaccaaaau

SEQ ID NO: 22727 - RNA, 19 nt, artificial
  Chemically synthesized
gcaaguaggagguaaugaa

SEQ ID NO: 22728 - RNA, 19 nt, artificial
  Chemically synthesized
acauucuucggguggucuu

SEQ ID NO: 22729 - RNA, 19 nt, artificial
  Chemically synthesized
aagugccuccagaagaggu

SEQ ID NO: 22730 - RNA, 19 nt, artificial
  Chemically synthesized
gccaccuaagccaucuaga

SEQ ID NO: 22731 - RNA, 19 nt, artificial
  Chemically synthesized
caaaggaagucaaaaaacu

SEQ ID NO: 22732 - RNA, 19 nt, artificial
  Chemically synthesized
agucagagguuuggcaaug

SEQ ID NO: 22733 - RNA, 19 nt, artificial
  Chemically synthesized
ggaagcaacccacuuaagc

SEQ ID NO: 22734 - RNA, 19 nt, artificial
  Chemically synthesized
uccaaacaagaacccuggu

SEQ ID NO: 22735 - RNA, 19 nt, artificial
  Chemically synthesized
ggcacauuaauuccgagcu

SEQ ID NO: 22736 - RNA, 19 nt, artificial
  Chemically synthesized
ugcccaacagaacaggcuu

SEQ ID NO: 22737 - RNA, 19 nt, artificial
  Chemically synthesized
ugugaccagcaaaggcuca

SEQ ID NO: 22738 - RNA, 19 nt, artificial
  Chemically synthesized
agccaaagauuucugcacu

SEQ ID NO: 22739 - RNA, 19 nt, artificial
  Chemically synthesized
agggaaaaagggcaaagga

SEQ ID NO: 22740 - RNA, 19 nt, artificial
  Chemically synthesized
cuggaagcaacccacuuaa

SEQ ID NO: 22741 - RNA, 19 nt, artificial
  Chemically synthesized
agacacuggcugcagaaau

SEQ ID NO: 22742 - RNA, 19 nt, artificial
  Chemically synthesized
agguaaugaaaucuggaaa

SEQ ID NO: 22743 - RNA, 19 nt, artificial
  Chemically synthesized
guacauucuucgggugguc

SEQ ID NO: 22744 - RNA, 19 nt, artificial
  Chemically synthesized
aaccucagcgaacguuuau

SEQ ID NO: 22745 - RNA, 19 nt, artificial
  Chemically synthesized
ugccacagccaaacacgaa

SEQ ID NO: 22746 - RNA, 19 nt, artificial
  Chemically synthesized
gcugguaaaguagucaggg

SEQ ID NO: 22747 - RNA, 19 nt, artificial
  Chemically synthesized
caagcauaaaggaccaaaa

SEQ ID NO: 22748 - RNA, 19 nt, artificial
  Chemically synthesized
gaacauuuacagucaucac

SEQ ID NO: 22749 - RNA, 19 nt, artificial
  Chemically synthesized
gaugggugaauggcaagua

SEQ ID NO: 22750 - RNA, 19 nt, artificial
  Chemically synthesized
cacuggauaccacucccua

SEQ ID NO: 22751 - RNA, 19 nt, artificial
  Chemically synthesized
gcaggguccaaacaagaac

SEQ ID NO: 22752 - RNA, 19 nt, artificial
  Chemically synthesized
caguggauauaguuccaga

SEQ ID NO: 22753 - RNA, 19 nt, artificial
  Chemically synthesized
ucaccaccagucugcagaa

SEQ ID NO: 22754 - RNA, 19 nt, artificial
  Chemically synthesized
caggaaggccacaacacuu

SEQ ID NO: 22755 - RNA, 19 nt, artificial
  Chemically synthesized
cagagucagugcaaugaac

SEQ ID NO: 22756 - RNA, 19 nt, artificial
  Chemically synthesized
cagaguuguucaacggguc

SEQ ID NO: 22757 - RNA, 19 nt, artificial
  Chemically synthesized
aggcucaaacucucuagag

SEQ ID NO: 22758 - RNA, 19 nt, artificial
  Chemically synthesized
cauaaucauagucaucaua

SEQ ID NO: 22759 - RNA, 19 nt, artificial
  Chemically synthesized
cugcacuugaacacuggau

SEQ ID NO: 22760 - RNA, 19 nt, artificial
  Chemically synthesized
cagugcaaugaacugucca

SEQ ID NO: 22761 - RNA, 19 nt, artificial
  Chemically synthesized
acagccaaacacgaaggag

SEQ ID NO: 22762 - RNA, 19 nt, artificial
  Chemically synthesized
gucccuuaggaucuccaag

SEQ ID NO: 22763 - RNA, 19 nt, artificial
  Chemically synthesized
gaccaaaauaaagaggauu

SEQ ID NO: 22764 - RNA, 19 nt, artificial
  Chemically synthesized
cauucuucggguggucuuc

SEQ ID NO: 22765 - RNA, 19 nt, artificial
  Chemically synthesized
ccgagugaaguccucauau

SEQ ID NO: 22766 - RNA, 19 nt, artificial
  Chemically synthesized
cccuugccuuucuucagug

SEQ ID NO: 22767 - RNA, 19 nt, artificial
  Chemically synthesized
caaacuggucagagaggag

SEQ ID NO: 22768 - RNA, 19 nt, artificial
  Chemically synthesized
gacugcacaucacacacaa

SEQ ID NO: 22769 - RNA, 19 nt, artificial
  Chemically synthesized
ccugcacggguauuuaaug

SEQ ID NO: 22770 - RNA, 19 nt, artificial
  Chemically synthesized
auggucuucccagguauaa

SEQ ID NO: 22771 - RNA, 19 nt, artificial
  Chemically synthesized
ccaucuagaaaggcucaac

SEQ ID NO: 22772 - RNA, 19 nt, artificial
  Chemically synthesized
agggcaaaggaagucaaaa

SEQ ID NO: 22773 - RNA, 19 nt, artificial
  Chemically synthesized
cuccucuucagaaggcaau

SEQ ID NO: 22774 - RNA, 19 nt, artificial
  Chemically synthesized
cagaagcugguaaaguagu

SEQ ID NO: 22775 - RNA, 19 nt, artificial
  Chemically synthesized
gggucuuccacaaagcaca

SEQ ID NO: 22776 - RNA, 19 nt, artificial
  Chemically synthesized
ccagaguuguucaacgggu

SEQ ID NO: 22777 - RNA, 19 nt, artificial
  Chemically synthesized
gcucaaacucucuagagau

SEQ ID NO: 22778 - RNA, 19 nt, artificial
  Chemically synthesized
ccuaccagguaagaacacu

SEQ ID NO: 22779 - RNA, 19 nt, artificial
  Chemically synthesized
gauauagaccuugagguuc

SEQ ID NO: 22780 - RNA, 19 nt, artificial
  Chemically synthesized
gaacaggcuuuuagggaac

SEQ ID NO: 22781 - RNA, 19 nt, artificial
  Chemically synthesized
aacugguagcaaagccaaa

SEQ ID NO: 22782 - RNA, 19 nt, artificial
  Chemically synthesized
gcagccaugauggcaaugu

SEQ ID NO: 22783 - RNA, 19 nt, artificial
  Chemically synthesized
ccucagcgaacguuuauuu

SEQ ID NO: 22784 - RNA, 19 nt, artificial
  Chemically synthesized
caauguagccauggucacc

SEQ ID NO: 22785 - RNA, 19 nt, artificial
  Chemically synthesized
acuucucauccagcagcug

SEQ ID NO: 22786 - RNA, 19 nt, artificial
  Chemically synthesized
agaacaggcuuuuagggaa

SEQ ID NO: 22787 - RNA, 19 nt, artificial
  Chemically synthesized
cagguaguccuugagcucu

SEQ ID NO: 22788 - RNA, 19 nt, artificial
  Chemically synthesized
cauauggaacugguagcaa

SEQ ID NO: 22789 - RNA, 19 nt, artificial
  Chemically synthesized
ggcaaguaggagguaauga

SEQ ID NO: 22790 - RNA, 19 nt, artificial
  Chemically synthesized
ggucuucccagguauaauc

SEQ ID NO: 22791 - RNA, 19 nt, artificial
  Chemically synthesized
gguccaaacaagaacccug

SEQ ID NO: 22792 - RNA, 19 nt, artificial
  Chemically synthesized
ccacccagugaacauuuac

SEQ ID NO: 22793 - RNA, 19 nt, artificial
  Chemically synthesized
aaauccgcuugcuguuggc

SEQ ID NO: 22794 - RNA, 19 nt, artificial
  Chemically synthesized
aauccgcuugcuguuggca

SEQ ID NO: 22795 - RNA, 19 nt, artificial
  Chemically synthesized
cugaugccaaagacgcagu

SEQ ID NO: 22796 - RNA, 19 nt, artificial
  Chemically synthesized
cacugccagguugucuacu

SEQ ID NO: 22797 - RNA, 19 nt, artificial
  Chemically synthesized
agaagaagggcaagagaag

SEQ ID NO: 22798 - RNA, 19 nt, artificial
  Chemically synthesized
caaaaaacugaacuaggau

SEQ ID NO: 22799 - RNA, 19 nt, artificial
  Chemically synthesized
cugacgccucacaccauua

SEQ ID NO: 22800 - RNA, 19 nt, artificial
  Chemically synthesized
cacugucuugauauagacc

SEQ ID NO: 22801 - RNA, 19 nt, artificial
  Chemically synthesized
ccagaagcugguaaaguag

SEQ ID NO: 22802 - RNA, 19 nt, artificial
  Chemically synthesized
uccauuccagugaggaaaa

SEQ ID NO: 22803 - RNA, 19 nt, artificial
  Chemically synthesized
aguagccauggucuuccca

SEQ ID NO: 22804 - RNA, 19 nt, artificial
  Chemically synthesized
aaagaggauuuauaaucua

SEQ ID NO: 22805 - RNA, 19 nt, artificial
  Chemically synthesized
gacgccucacaccauuaag

SEQ ID NO: 22806 - RNA, 19 nt, artificial
  Chemically synthesized
guuguacauucuucgggug

SEQ ID NO: 22807 - RNA, 19 nt, artificial
  Chemically synthesized
agugccuccagaagagguu

SEQ ID NO: 22808 - RNA, 19 nt, artificial
  Chemically synthesized
gagucagugcaaugaacug

SEQ ID NO: 22809 - RNA, 19 nt, artificial
  Chemically synthesized
gcaugggacacaaaagggu

SEQ ID NO: 22810 - RNA, 19 nt, artificial
  Chemically synthesized
aaaccucagcgaacguuua

SEQ ID NO: 22811 - RNA, 19 nt, artificial
  Chemically synthesized
aagcauggagaaaagggaa

SEQ ID NO: 22812 - RNA, 19 nt, artificial
  Chemically synthesized
cuacccacccagugaacau

SEQ ID NO: 22813 - RNA, 19 nt, artificial
  Chemically synthesized
gaaggcaaugugaccagca

SEQ ID NO: 22814 - RNA, 19 nt, artificial
  Chemically synthesized
ugauauagaccuugagguu

SEQ ID NO: 22815 - RNA, 19 nt, artificial
  Chemically synthesized
cauaaaggaccaaaauaaa

SEQ ID NO: 22816 - RNA, 19 nt, artificial
  Chemically synthesized
cugagaucccagagucagu

SEQ ID NO: 22817 - RNA, 19 nt, artificial
  Chemically synthesized
gaccagcaaaggcucaaac

SEQ ID NO: 22818 - RNA, 19 nt, artificial
  Chemically synthesized
guaggugaggcuauaggcu

SEQ ID NO: 22819 - RNA, 19 nt, artificial
  Chemically synthesized
guguggucccuuaggaucu

SEQ ID NO: 22820 - RNA, 19 nt, artificial
  Chemically synthesized
gaacagaauucucccucuc

SEQ ID NO: 22821 - RNA, 19 nt, artificial
  Chemically synthesized
auggugccaccuaagccau

SEQ ID NO: 22822 - RNA, 19 nt, artificial
  Chemically synthesized
ggcaaugugaccagcaaag

SEQ ID NO: 22823 - RNA, 19 nt, artificial
  Chemically synthesized
gaaaaagggcaaaggaagu

SEQ ID NO: 22824 - RNA, 19 nt, artificial
  Chemically synthesized
agcagcaaguucacgugga

SEQ ID NO: 22825 - RNA, 19 nt, artificial
  Chemically synthesized
aguucacguggaccuucuc

SEQ ID NO: 22826 - RNA, 19 nt, artificial
  Chemically synthesized
guggcacauuaauuccgag

SEQ ID NO: 22827 - RNA, 19 nt, artificial
  Chemically synthesized
acagaugagauacugggau

SEQ ID NO: 22828 - RNA, 19 nt, artificial
  Chemically synthesized
cagucauuugcuacagaaa

SEQ ID NO: 22829 - RNA, 19 nt, artificial
  Chemically synthesized
cuguccauuccagugagga

SEQ ID NO: 22830 - RNA, 19 nt, artificial
  Chemically synthesized
gugaacauuuacagucauc

SEQ ID NO: 22831 - RNA, 19 nt, artificial
  Chemically synthesized
gaggauuuauaaucuaaua

SEQ ID NO: 22832 - RNA, 19 nt, artificial
  Chemically synthesized
cauuuacagucaucacaug

SEQ ID NO: 22833 - RNA, 19 nt, artificial
  Chemically synthesized
cucaaacucucuagagaua

SEQ ID NO: 22834 - RNA, 19 nt, artificial
  Chemically synthesized
cgaaaguagggucuuccac

SEQ ID NO: 22835 - RNA, 19 nt, artificial
  Chemically synthesized
caccuaagccaucuagaaa

SEQ ID NO: 22836 - RNA, 19 nt, artificial
  Chemically synthesized
aaguagggucuuccacaaa

SEQ ID NO: 22837 - RNA, 19 nt, artificial
  Chemically synthesized
gcaaugugaccagcaaagg

SEQ ID NO: 22838 - RNA, 19 nt, artificial
  Chemically synthesized
aacaggcuuuuagggaacu

SEQ ID NO: 22839 - RNA, 19 nt, artificial
  Chemically synthesized
cacagucauuugcuacaga

SEQ ID NO: 22840 - RNA, 19 nt, artificial
  Chemically synthesized
uucuugcagggagggcuuu

SEQ ID NO: 22841 - RNA, 19 nt, artificial
  Chemically synthesized
gcccuugccuuucuucagu

SEQ ID NO: 22842 - RNA, 19 nt, artificial
  Chemically synthesized
gcaaaggaagucaaaaaac

SEQ ID NO: 22843 - RNA, 19 nt, artificial
  Chemically synthesized
accagguaagaacacugau

SEQ ID NO: 22844 - RNA, 19 nt, artificial
  Chemically synthesized
aagucaaaaaacugaacua

SEQ ID NO: 22845 - RNA, 19 nt, artificial
  Chemically synthesized
cugggagaacagaauucuc

SEQ ID NO: 22846 - RNA, 19 nt, artificial
  Chemically synthesized
ccagaagagguuguacauu

SEQ ID NO: 22847 - RNA, 19 nt, artificial
  Chemically synthesized
gcaagagaagucguaauuc

SEQ ID NO: 22848 - RNA, 19 nt, artificial
  Chemically synthesized
gggugaauggcaaguagga

SEQ ID NO: 22849 - RNA, 19 nt, artificial
  Chemically synthesized
ccaaaauaaagaggauuua

SEQ ID NO: 22850 - RNA, 19 nt, artificial
  Chemically synthesized
cugaacuaggauucgggca

SEQ ID NO: 22851 - RNA, 19 nt, artificial
  Chemically synthesized
gcaaaggcucaaacucucu

SEQ ID NO: 22852 - RNA, 19 nt, artificial
  Chemically synthesized
ggcgaugguauuguaggug

SEQ ID NO: 22853 - RNA, 19 nt, artificial
  Chemically synthesized
gguaaugaaaucuggaaau

SEQ ID NO: 22854 - RNA, 19 nt, artificial
  Chemically synthesized
agccaaacacgaaggagga

SEQ ID NO: 22855 - RNA, 19 nt, artificial
  Chemically synthesized
ggagguaaugaaaucugga

SEQ ID NO: 22856 - RNA, 19 nt, artificial
  Chemically synthesized
uguccacaccacugugcau

SEQ ID NO: 22857 - RNA, 19 nt, artificial
  Chemically synthesized
aggcacagacugcuagaag

SEQ ID NO: 22858 - RNA, 19 nt, artificial
  Chemically synthesized
gguauuguaggugaggcua

SEQ ID NO: 22859 - RNA, 19 nt, artificial
  Chemically synthesized
ugaccagcaaaggcucaaa

SEQ ID NO: 22860 - RNA, 19 nt, artificial
  Chemically synthesized
gccaugauggcaauguagu

SEQ ID NO: 22861 - RNA, 19 nt, artificial
  Chemically synthesized
acaaaaccucagcgaacgu

SEQ ID NO: 22862 - RNA, 19 nt, artificial
  Chemically synthesized
guucaggaaggccacaaca

SEQ ID NO: 22863 - RNA, 19 nt, artificial
  Chemically synthesized
cauuaagcauggagaaaag

SEQ ID NO: 22864 - RNA, 19 nt, artificial
  Chemically synthesized
ggaacugguagcaaagcca

SEQ ID NO: 22865 - RNA, 19 nt, artificial
  Chemically synthesized
aagggcaaaggaagucaaa

SEQ ID NO: 22866 - RNA, 19 nt, artificial
  Chemically synthesized
gaaucacagaaacacuuuu

SEQ ID NO: 22867 - RNA, 19 nt, artificial
  Chemically synthesized
ccguggucuauaucgagau

SEQ ID NO: 22868 - RNA, 19 nt, artificial
  Chemically synthesized
gacauggguuucuugguaa

SEQ ID NO: 22869 - RNA, 19 nt, artificial
  Chemically synthesized
ccgagacagaggguuaaau

SEQ ID NO: 22870 - RNA, 19 nt, artificial
  Chemically synthesized
gaugguacaaaaugcugaa

SEQ ID NO: 22871 - RNA, 19 nt, artificial
  Chemically synthesized
cguggucuauaucgagauc

SEQ ID NO: 22872 - RNA, 19 nt, artificial
  Chemically synthesized
gccguggucuauaucgaga

SEQ ID NO: 22873 - RNA, 19 nt, artificial
  Chemically synthesized
gugcugcucuuuguggugu

SEQ ID NO: 22874 - RNA, 19 nt, artificial
  Chemically synthesized
aggauucagacuaaguuug

SEQ ID NO: 22875 - RNA, 19 nt, artificial
  Chemically synthesized
ggugaaaacuucugcuuga

SEQ ID NO: 22876 - RNA, 19 nt, artificial
  Chemically synthesized
ccugcucugauuuccuccu

SEQ ID NO: 22877 - RNA, 19 nt, artificial
  Chemically synthesized
ugagugcgguugcugacau

SEQ ID NO: 22878 - RNA, 19 nt, artificial
  Chemically synthesized
agggugaaaacuucugcuu

SEQ ID NO: 22879 - RNA, 19 nt, artificial
  Chemically synthesized
gucaggugcugcucuuugu

SEQ ID NO: 22880 - RNA, 19 nt, artificial
  Chemically synthesized
gugaugugauuuuggccau

SEQ ID NO: 22881 - RNA, 19 nt, artificial
  Chemically synthesized
gccuggugaugugauuuug

SEQ ID NO: 22882 - RNA, 19 nt, artificial
  Chemically synthesized
cugccguggucuauaucga

SEQ ID NO: 22883 - RNA, 19 nt, artificial
  Chemically synthesized
caucuuuugugggcaguua

SEQ ID NO: 22884 - RNA, 19 nt, artificial
  Chemically synthesized
ggugaugugauuuuggcca

SEQ ID NO: 22885 - RNA, 19 nt, artificial
  Chemically synthesized
gcugcugccaucuuuugug

SEQ ID NO: 22886 - RNA, 19 nt, artificial
  Chemically synthesized
accauccugaccuccuauu

SEQ ID NO: 22887 - RNA, 19 nt, artificial
  Chemically synthesized
ugguacaaaaugcugaaga

SEQ ID NO: 22888 - RNA, 19 nt, artificial
  Chemically synthesized
gagggugaaaacuucugcu

SEQ ID NO: 22889 - RNA, 19 nt, artificial
  Chemically synthesized
gccucagagaacucuggaa

SEQ ID NO: 22890 - RNA, 19 nt, artificial
  Chemically synthesized
aggucacagaaugaauaga

SEQ ID NO: 22891 - RNA, 19 nt, artificial
  Chemically synthesized
uugcugacauggguuucuu

SEQ ID NO: 22892 - RNA, 19 nt, artificial
  Chemically synthesized
ccauagugcauggucugau

SEQ ID NO: 22893 - RNA, 19 nt, artificial
  Chemically synthesized
cugcugacgucaggaacuu

SEQ ID NO: 22894 - RNA, 19 nt, artificial
  Chemically synthesized
cucugaagaaucacagaaa

SEQ ID NO: 22895 - RNA, 19 nt, artificial
  Chemically synthesized
cgcugaggauucagacuaa

SEQ ID NO: 22896 - RNA, 19 nt, artificial
  Chemically synthesized
cccggagucaguacaacuu

SEQ ID NO: 22897 - RNA, 19 nt, artificial
  Chemically synthesized
acgcugaggauucagacua

SEQ ID NO: 22898 - RNA, 19 nt, artificial
  Chemically synthesized
gcucugaagaaucacagaa

SEQ ID NO: 22899 - RNA, 19 nt, artificial
  Chemically synthesized
aggguuaaaugaaccagug

SEQ ID NO: 22900 - RNA, 19 nt, artificial
  Chemically synthesized
gugcacuucugaaggacuu

SEQ ID NO: 22901 - RNA, 19 nt, artificial
  Chemically synthesized
ccucagagaacucuggaac

SEQ ID NO: 22902 - RNA, 19 nt, artificial
  Chemically synthesized
gaggguuaaaugaaccagu

SEQ ID NO: 22903 - RNA, 19 nt, artificial
  Chemically synthesized
ccaagaguaugaggcuccu

SEQ ID NO: 22904 - RNA, 19 nt, artificial
  Chemically synthesized
cagaaugaauagaucacca

SEQ ID NO: 22905 - RNA, 19 nt, artificial
  Chemically synthesized
ucccaugcuuggcuacaga

SEQ ID NO: 22906 - RNA, 19 nt, artificial
  Chemically synthesized
gggcucugaagaaucacag

SEQ ID NO: 22907 - RNA, 19 nt, artificial
  Chemically synthesized
cuccugggcucugaagaau

SEQ ID NO: 22908 - RNA, 19 nt, artificial
  Chemically synthesized
gacuaaguuuggaaacucu

SEQ ID NO: 22909 - RNA, 19 nt, artificial
  Chemically synthesized
gcacugcaaauaacccauc

SEQ ID NO: 22910 - RNA, 19 nt, artificial
  Chemically synthesized
acugcaaauaacccaucuu

SEQ ID NO: 22911 - RNA, 19 nt, artificial
  Chemically synthesized
ggaugccucaguguuaaaa

SEQ ID NO: 22912 - RNA, 19 nt, artificial
  Chemically synthesized
cacugcaaauaacccaucu

SEQ ID NO: 22913 - RNA, 19 nt, artificial
  Chemically synthesized
gggcaaaaauacaguccaa

SEQ ID NO: 22914 - RNA, 19 nt, artificial
  Chemically synthesized
ugauaaguaacccuguaau

SEQ ID NO: 22915 - RNA, 19 nt, artificial
  Chemically synthesized
ggaguaucauuguuuuugu

SEQ ID NO: 22916 - RNA, 19 nt, artificial
  Chemically synthesized
gccucauugaauucgccua

SEQ ID NO: 22917 - RNA, 19 nt, artificial
  Chemically synthesized
gcagcugucaccaugugau

SEQ ID NO: 22918 - RNA, 19 nt, artificial
  Chemically synthesized
ggcaaaaauacaguccaau

SEQ ID NO: 22919 - RNA, 19 nt, artificial
  Chemically synthesized
caccaugugauuuauucuu

SEQ ID NO: 22920 - RNA, 19 nt, artificial
  Chemically synthesized
cgggacuaaaagaaaagac

SEQ ID NO: 22921 - RNA, 19 nt, artificial
  Chemically synthesized
gggacuaaaagaaaagaca

SEQ ID NO: 22922 - RNA, 19 nt, artificial
  Chemically synthesized
ccgggacuaaaagaaaaga

SEQ ID NO: 22923 - RNA, 19 nt, artificial
  Chemically synthesized
gggaguaucauuguuuuug

SEQ ID NO: 22924 - RNA, 19 nt, artificial
  Chemically synthesized
cucauugaauucgccuaca

SEQ ID NO: 22925 - RNA, 19 nt, artificial
  Chemically synthesized
caucucaaaagaaguccaa

SEQ ID NO: 22926 - RNA, 19 nt, artificial
  Chemically synthesized
guguuaaaaugacaucuca

SEQ ID NO: 22927 - RNA, 19 nt, artificial
  Chemically synthesized
cucaguguuaaaaugacau

SEQ ID NO: 22928 - RNA, 19 nt, artificial
  Chemically synthesized
ccucaguguuaaaaugaca

SEQ ID NO: 22929 - RNA, 19 nt, artificial
  Chemically synthesized
ccuuaauucagcugagugu

SEQ ID NO: 22930 - RNA, 19 nt, artificial
  Chemically synthesized
cccgggaguacaucuacau

SEQ ID NO: 22931 - RNA, 19 nt, artificial
  Chemically synthesized
ccucauugaauucgccuac

SEQ ID NO: 22932 - RNA, 19 nt, artificial
  Chemically synthesized
accgggacuaaaagaaaag

SEQ ID NO: 22933 - RNA, 19 nt, artificial
  Chemically synthesized
ccucaaucgucuccuuuau

SEQ ID NO: 22934 - RNA, 19 nt, artificial
  Chemically synthesized
cugucuucaaggccauguu

SEQ ID NO: 22935 - RNA, 19 nt, artificial
  Chemically synthesized
acgucacacugcaggucaa

SEQ ID NO: 22936 - RNA, 19 nt, artificial
  Chemically synthesized
aaccgggacuaaaagaaaa

SEQ ID NO: 22937 - RNA, 19 nt, artificial
  Chemically synthesized
ugaggcacuuuuguuucuu

SEQ ID NO: 22938 - RNA, 19 nt, artificial
  Chemically synthesized
agaggaacgaguggcgaau

SEQ ID NO: 22939 - RNA, 19 nt, artificial
  Chemically synthesized
caguguuaaaaugacaucu

SEQ ID NO: 22940 - RNA, 19 nt, artificial
  Chemically synthesized
agcgcuacgauguggaaac

SEQ ID NO: 22941 - RNA, 19 nt, artificial
  Chemically synthesized
acaguguggagagguauga

SEQ ID NO: 22942 - RNA, 19 nt, artificial
  Chemically synthesized
gguguccauugaggguauc

SEQ ID NO: 22943 - RNA, 19 nt, artificial
  Chemically synthesized
gaggcacuuuuguuucuug

SEQ ID NO: 22944 - RNA, 19 nt, artificial
  Chemically synthesized
ccuuuggcaucaugaacga

SEQ ID NO: 22945 - RNA, 19 nt, artificial
  Chemically synthesized
uccugcacaacuguaucua

SEQ ID NO: 22946 - RNA, 19 nt, artificial
  Chemically synthesized
agguggugguguugcuuau

SEQ ID NO: 22947 - RNA, 19 nt, artificial
  Chemically synthesized
gcugucaccaugugauuua

SEQ ID NO: 22948 - RNA, 19 nt, artificial
  Chemically synthesized
gccucaguguuaaaaugac

SEQ ID NO: 22949 - RNA, 19 nt, artificial
  Chemically synthesized
ugcaucaacugggucaagu

SEQ ID NO: 22950 - RNA, 19 nt, artificial
  Chemically synthesized
uggugguguugcuuaucuu

SEQ ID NO: 22951 - RNA, 19 nt, artificial
  Chemically synthesized
uggacaguuauuuuguuga

SEQ ID NO: 22952 - RNA, 19 nt, artificial
  Chemically synthesized
uuuguuucuugggcaaaaa

SEQ ID NO: 22953 - RNA, 19 nt, artificial
  Chemically synthesized
gcaaugaacaccauccgaa

SEQ ID NO: 22954 - RNA, 19 nt, artificial
  Chemically synthesized
ccaaggaaaauaaagaaca

SEQ ID NO: 22955 - RNA, 19 nt, artificial
  Chemically synthesized
guccugcacaacuguaucu

SEQ ID NO: 22956 - RNA, 19 nt, artificial
  Chemically synthesized
ugccuuauaaccugccuuu

SEQ ID NO: 22957 - RNA, 19 nt, artificial
  Chemically synthesized
gugccuuauaaccugccuu

SEQ ID NO: 22958 - RNA, 19 nt, artificial
  Chemically synthesized
gggaauuucuggugacaua

SEQ ID NO: 22959 - RNA, 19 nt, artificial
  Chemically synthesized
ccaugauauaaucugaaag

SEQ ID NO: 22960 - RNA, 19 nt, artificial
  Chemically synthesized
gagagucauuguuugcaau

SEQ ID NO: 22961 - RNA, 19 nt, artificial
  Chemically synthesized
gaaaauggcagacaauuuu

SEQ ID NO: 22962 - RNA, 19 nt, artificial
  Chemically synthesized
agcggaaaauggcagacaa

SEQ ID NO: 22963 - RNA, 19 nt, artificial
  Chemically synthesized
ggguuaaaaaacucaauga

SEQ ID NO: 22964 - RNA, 19 nt, artificial
  Chemically synthesized
cggguuaaaaaacucaaug

SEQ ID NO: 22965 - RNA, 19 nt, artificial
  Chemically synthesized
caagguugcagugaaugau

SEQ ID NO: 22966 - RNA, 19 nt, artificial
  Chemically synthesized
gaccucaccagugcuucau

SEQ ID NO: 22967 - RNA, 19 nt, artificial
  Chemically synthesized
cuuuaacccacgcuucaau

SEQ ID NO: 22968 - RNA, 19 nt, artificial
  Chemically synthesized
aagaaagacagucgguuuu

SEQ ID NO: 22969 - RNA, 19 nt, artificial
  Chemically synthesized
gagcggaaaauggcagaca

SEQ ID NO: 22970 - RNA, 19 nt, artificial
  Chemically synthesized
ugcguuaucugggucugga

SEQ ID NO: 22971 - RNA, 19 nt, artificial
  Chemically synthesized
cccucuuguaagucaucua

SEQ ID NO: 22972 - RNA, 19 nt, artificial
  Chemically synthesized
cugggaauuucuggugaca

SEQ ID NO: 22973 - RNA, 19 nt, artificial
  Chemically synthesized
aguacaaucaucggguuaa

SEQ ID NO: 22974 - RNA, 19 nt, artificial
  Chemically synthesized
gucauuguuugcaauacaa

SEQ ID NO: 22975 - RNA, 19 nt, artificial
  Chemically synthesized
gguuucauguucacuguga

SEQ ID NO: 22976 - RNA, 19 nt, artificial
  Chemically synthesized
ugcaauacaaagcuggaua

SEQ ID NO: 22977 - RNA, 19 nt, artificial
  Chemically synthesized
cacgcuucaaugagaacaa

SEQ ID NO: 22978 - RNA, 19 nt, artificial
  Chemically synthesized
gggaagggaagaaagacag

SEQ ID NO: 22979 - RNA, 19 nt, artificial
  Chemically synthesized
gcuucauauaccaugauau

SEQ ID NO: 22980 - RNA, 19 nt, artificial
  Chemically synthesized
cuucaagguugcagugaau

SEQ ID NO: 22981 - RNA, 19 nt, artificial
  Chemically synthesized
ccacgcuucaaugagaaca

SEQ ID NO: 22982 - RNA, 19 nt, artificial
  Chemically synthesized
ucccucuuguaagucaucu

SEQ ID NO: 22983 - RNA, 19 nt, artificial
  Chemically synthesized
acagucgguuuucccauuu

SEQ ID NO: 22984 - RNA, 19 nt, artificial
  Chemically synthesized
acgcuucaaugagaacaac

SEQ ID NO: 22985 - RNA, 19 nt, artificial
  Chemically synthesized
agucauuguuugcaauaca

SEQ ID NO: 22986 - RNA, 19 nt, artificial
  Chemically synthesized
acccacgcuucaaugagaa

SEQ ID NO: 22987 - RNA, 19 nt, artificial
  Chemically synthesized
gagggaaugauguugccuu

SEQ ID NO: 22988 - RNA, 19 nt, artificial
  Chemically synthesized
cucaaugaaaucagcaaac

SEQ ID NO: 22989 - RNA, 19 nt, artificial
  Chemically synthesized
cccauuugaaagugggaaa

SEQ ID NO: 22990 - RNA, 19 nt, artificial
  Chemically synthesized
gccacugauugugccuuau

SEQ ID NO: 22991 - RNA, 19 nt, artificial
  Chemically synthesized
ccucuuguaagucaucuac

SEQ ID NO: 22992 - RNA, 19 nt, artificial
  Chemically synthesized
cuaaaccuuacauguguaa

SEQ ID NO: 22993 - RNA, 19 nt, artificial
  Chemically synthesized
gugcuucauauaccaugau

SEQ ID NO: 22994 - RNA, 19 nt, artificial
  Chemically synthesized
cagucgguuuucccauuug

SEQ ID NO: 22995 - RNA, 19 nt, artificial
  Chemically synthesized
ggaaacccaaacccucaag

SEQ ID NO: 22996 - RNA, 19 nt, artificial
  Chemically synthesized
cucacuuguugcaguacaa

SEQ ID NO: 22997 - RNA, 19 nt, artificial
  Chemically synthesized
auguugccuuccacuuuaa

SEQ ID NO: 22998 - RNA, 19 nt, artificial
  Chemically synthesized
cagccaacgagcggaaaau

SEQ ID NO: 22999 - RNA, 19 nt, artificial
  Chemically synthesized
cgcuccaugaugcguuauc

SEQ ID NO: 23000 - RNA, 19 nt, artificial
  Chemically synthesized
ucggguuaaaaaacucaau

SEQ ID NO: 23001 - RNA, 19 nt, artificial
  Chemically synthesized
ccauuugaaagugggaaac

SEQ ID NO: 23002 - RNA, 19 nt, artificial
  Chemically synthesized
gguuuucccauuugaaagu

SEQ ID NO: 23003 - RNA, 19 nt, artificial
  Chemically synthesized
gagucauuguuugcaauac

SEQ ID NO: 23004 - RNA, 19 nt, artificial
  Chemically synthesized
gagaauauuucacccuuca

SEQ ID NO: 23005 - RNA, 19 nt, artificial
  Chemically synthesized
ccgaguggaaggaaauuug

SEQ ID NO: 23006 - RNA, 19 nt, artificial
  Chemically synthesized
gacagaaacacuuuucgac

SEQ ID NO: 23007 - RNA, 19 nt, artificial
  Chemically synthesized
accugaaauuugcuggaau

SEQ ID NO: 23008 - RNA, 19 nt, artificial
  Chemically synthesized
cagagagcuuuuugaugau

SEQ ID NO: 23009 - RNA, 19 nt, artificial
  Chemically synthesized
cacaugcaaucuaucucau

SEQ ID NO: 23010 - RNA, 19 nt, artificial
  Chemically synthesized
ccgaggugaucauuuuaaa

SEQ ID NO: 23011 - RNA, 19 nt, artificial
  Chemically synthesized
gugaccacaucuuuaaaau

SEQ ID NO: 23012 - RNA, 19 nt, artificial
  Chemically synthesized
aaaaguguuucugugauuc

SEQ ID NO: 23013 - RNA, 19 nt, artificial
  Chemically synthesized
aucucgauauagaccacgg

SEQ ID NO: 23014 - RNA, 19 nt, artificial
  Chemically synthesized
uuaccaagaaacccauguc

SEQ ID NO: 23015 - RNA, 19 nt, artificial
  Chemically synthesized
auuuaacccucugucucgg

SEQ ID NO: 23016 - RNA, 19 nt, artificial
  Chemically synthesized
uucagcauuuuguaccauc

SEQ ID NO: 23017 - RNA, 19 nt, artificial
  Chemically synthesized
gaucucgauauagaccacg

SEQ ID NO: 23018 - RNA, 19 nt, artificial
  Chemically synthesized
ucucgauauagaccacggc

SEQ ID NO: 23019 - RNA, 19 nt, artificial
  Chemically synthesized
acaccacaaagagcagcac

SEQ ID NO: 23020 - RNA, 19 nt, artificial
  Chemically synthesized
caaacuuagucugaauccu

SEQ ID NO: 23021 - RNA, 19 nt, artificial
  Chemically synthesized
ucaagcagaaguuuucacc

SEQ ID NO: 23022 - RNA, 19 nt, artificial
  Chemically synthesized
aggaggaaaucagagcagg

SEQ ID NO: 23023 - RNA, 19 nt, artificial
  Chemically synthesized
augucagcaaccgcacuca

SEQ ID NO: 23024 - RNA, 19 nt, artificial
  Chemically synthesized
aagcagaaguuuucacccu

SEQ ID NO: 23025 - RNA, 19 nt, artificial
  Chemically synthesized
acaaagagcagcaccugac

SEQ ID NO: 23026 - RNA, 19 nt, artificial
  Chemically synthesized
auggccaaaaucacaucac

SEQ ID NO: 23027 - RNA, 19 nt, artificial
  Chemically synthesized
caaaaucacaucaccaggc

SEQ ID NO: 23028 - RNA, 19 nt, artificial
  Chemically synthesized
ucgauauagaccacggcag

SEQ ID NO: 23029 - RNA, 19 nt, artificial
  Chemically synthesized
uaacugcccacaaaagaug

SEQ ID NO: 23030 - RNA, 19 nt, artificial
  Chemically synthesized
uggccaaaaucacaucacc

SEQ ID NO: 23031 - RNA, 19 nt, artificial
  Chemically synthesized
cacaaaagauggcagcagc

SEQ ID NO: 23032 - RNA, 19 nt, artificial
  Chemically synthesized
aauaggaggucaggauggu

SEQ ID NO: 23033 - RNA, 19 nt, artificial
  Chemically synthesized
ucuucagcauuuuguacca

SEQ ID NO: 23034 - RNA, 19 nt, artificial
  Chemically synthesized
agcagaaguuuucacccuc

SEQ ID NO: 23035 - RNA, 19 nt, artificial
  Chemically synthesized
uuccagaguucucugaggc

SEQ ID NO: 23036 - RNA, 19 nt, artificial
  Chemically synthesized
ucuauucauucugugaccu

SEQ ID NO: 23037 - RNA, 19 nt, artificial
  Chemically synthesized
aagaaacccaugucagcaa

SEQ ID NO: 23038 - RNA, 19 nt, artificial
  Chemically synthesized
aucagaccaugcacuaugg

SEQ ID NO: 23039 - RNA, 19 nt, artificial
  Chemically synthesized
aaguuccugacgucagcag

SEQ ID NO: 23040 - RNA, 19 nt, artificial
  Chemically synthesized
uuucugugauucuucagag

SEQ ID NO: 23041 - RNA, 19 nt, artificial
  Chemically synthesized
uuagucugaauccucagcg

SEQ ID NO: 23042 - RNA, 19 nt, artificial
  Chemically synthesized
aaguuguacugacuccggg

SEQ ID NO: 23043 - RNA, 19 nt, artificial
  Chemically synthesized
uagucugaauccucagcgu

SEQ ID NO: 23044 - RNA, 19 nt, artificial
  Chemically synthesized
uucugugauucuucagagc

SEQ ID NO: 23045 - RNA, 19 nt, artificial
  Chemically synthesized
cacugguucauuuaacccu

SEQ ID NO: 23046 - RNA, 19 nt, artificial
  Chemically synthesized
aaguccuucagaagugcac

SEQ ID NO: 23047 - RNA, 19 nt, artificial
  Chemically synthesized
guuccagaguucucugagg

SEQ ID NO: 23048 - RNA, 19 nt, artificial
  Chemically synthesized
acugguucauuuaacccuc

SEQ ID NO: 23049 - RNA, 19 nt, artificial
  Chemically synthesized
aggagccucauacucuugg

SEQ ID NO: 23050 - RNA, 19 nt, artificial
  Chemically synthesized
uggugaucuauucauucug

SEQ ID NO: 23051 - RNA, 19 nt, artificial
  Chemically synthesized
ucuguagccaagcauggga

SEQ ID NO: 23052 - RNA, 19 nt, artificial
  Chemically synthesized
cugugauucuucagagccc

SEQ ID NO: 23053 - RNA, 19 nt, artificial
  Chemically synthesized
auucuucagagcccaggag

SEQ ID NO: 23054 - RNA, 19 nt, artificial
  Chemically synthesized
agaguuuccaaacuuaguc

SEQ ID NO: 23055 - RNA, 19 nt, artificial
  Chemically synthesized
gauggguuauuugcagugc

SEQ ID NO: 23056 - RNA, 19 nt, artificial
  Chemically synthesized
aagauggguuauuugcagu

SEQ ID NO: 23057 - RNA, 19 nt, artificial
  Chemically synthesized
uuuuaacacugaggcaucc

SEQ ID NO: 23058 - RNA, 19 nt, artificial
  Chemically synthesized
agauggguuauuugcagug

SEQ ID NO: 23059 - RNA, 19 nt, artificial
  Chemically synthesized
uuggacuguauuuuugccc

SEQ ID NO: 23060 - RNA, 19 nt, artificial
  Chemically synthesized
auuacaggguuacuuauca

SEQ ID NO: 23061 - RNA, 19 nt, artificial
  Chemically synthesized
acaaaaacaaugauacucc

SEQ ID NO: 23062 - RNA, 19 nt, artificial
  Chemically synthesized
uaggcgaauucaaugaggc

SEQ ID NO: 23063 - RNA, 19 nt, artificial
  Chemically synthesized
aucacauggugacagcugc

SEQ ID NO: 23064 - RNA, 19 nt, artificial
  Chemically synthesized
auuggacuguauuuuugcc

SEQ ID NO: 23065 - RNA, 19 nt, artificial
  Chemically synthesized
aagaauaaaucacauggug

SEQ ID NO: 23066 - RNA, 19 nt, artificial
  Chemically synthesized
gucuuuucuuuuagucccg

SEQ ID NO: 23067 - RNA, 19 nt, artificial
  Chemically synthesized
ugucuuuucuuuuaguccc

SEQ ID NO: 23068 - RNA, 19 nt, artificial
  Chemically synthesized
ucuuuucuuuuagucccgg

SEQ ID NO: 23069 - RNA, 19 nt, artificial
  Chemically synthesized
caaaaacaaugauacuccc

SEQ ID NO: 23070 - RNA, 19 nt, artificial
  Chemically synthesized
uguaggcgaauucaaugag

SEQ ID NO: 23071 - RNA, 19 nt, artificial
  Chemically synthesized
uuggacuucuuuugagaug

SEQ ID NO: 23072 - RNA, 19 nt, artificial
  Chemically synthesized
ugagaugucauuuuaacac

SEQ ID NO: 23073 - RNA, 19 nt, artificial
  Chemically synthesized
augucauuuuaacacugag

SEQ ID NO: 23074 - RNA, 19 nt, artificial
  Chemically synthesized
ugucauuuuaacacugagg

SEQ ID NO: 23075 - RNA, 19 nt, artificial
  Chemically synthesized
acacucagcugaauuaagg

SEQ ID NO: 23076 - RNA, 19 nt, artificial
  Chemically synthesized
auguagauguacucccggg

SEQ ID NO: 23077 - RNA, 19 nt, artificial
  Chemically synthesized
guaggcgaauucaaugagg

SEQ ID NO: 23078 - RNA, 19 nt, artificial
  Chemically synthesized
cuuuucuuuuagucccggu

SEQ ID NO: 23079 - RNA, 19 nt, artificial
  Chemically synthesized
auaaaggagacgauugagg

SEQ ID NO: 23080 - RNA, 19 nt, artificial
  Chemically synthesized
aacauggccuugaagacag

SEQ ID NO: 23081 - RNA, 19 nt, artificial
  Chemically synthesized
uugaccugcagugugacgu

SEQ ID NO: 23082 - RNA, 19 nt, artificial
  Chemically synthesized
uuuucuuuuagucccgguu

SEQ ID NO: 23083 - RNA, 19 nt, artificial
  Chemically synthesized
aagaaacaaaagugccuca

SEQ ID NO: 23084 - RNA, 19 nt, artificial
  Chemically synthesized
auucgccacucguuccucu

SEQ ID NO: 23085 - RNA, 19 nt, artificial
  Chemically synthesized
agaugucauuuuaacacug

SEQ ID NO: 23086 - RNA, 19 nt, artificial
  Chemically synthesized
guuuccacaucguagcgcu

SEQ ID NO: 23087 - RNA, 19 nt, artificial
  Chemically synthesized
ucauaccucuccacacugu

SEQ ID NO: 23088 - RNA, 19 nt, artificial
  Chemically synthesized
gauacccucaauggacacc

SEQ ID NO: 23089 - RNA, 19 nt, artificial
  Chemically synthesized
caagaaacaaaagugccuc

SEQ ID NO: 23090 - RNA, 19 nt, artificial
  Chemically synthesized
ucguucaugaugccaaagg

SEQ ID NO: 23091 - RNA, 19 nt, artificial
  Chemically synthesized
uagauacaguugugcagga

SEQ ID NO: 23092 - RNA, 19 nt, artificial
  Chemically synthesized
auaagcaacaccaccaccu

SEQ ID NO: 23093 - RNA, 19 nt, artificial
  Chemically synthesized
uaaaucacauggugacagc

SEQ ID NO: 23094 - RNA, 19 nt, artificial
  Chemically synthesized
gucauuuuaacacugaggc

SEQ ID NO: 23095 - RNA, 19 nt, artificial
  Chemically synthesized
acuugacccaguugaugca

SEQ ID NO: 23096 - RNA, 19 nt, artificial
  Chemically synthesized
aagauaagcaacaccacca

SEQ ID NO: 23097 - RNA, 19 nt, artificial
  Chemically synthesized
ucaacaaaauaacugucca

SEQ ID NO: 23098 - RNA, 19 nt, artificial
  Chemically synthesized
uuuuugcccaagaaacaaa

SEQ ID NO: 23099 - RNA, 19 nt, artificial
  Chemically synthesized
uucggaugguguucauugc

SEQ ID NO: 23100 - RNA, 19 nt, artificial
  Chemically synthesized
uguucuuuauuuuccuugg

SEQ ID NO: 23101 - RNA, 19 nt, artificial
  Chemically synthesized
agauacaguugugcaggac

SEQ ID NO: 23102 - RNA, 19 nt, artificial
  Chemically synthesized
aaaggcagguuauaaggca

SEQ ID NO: 23103 - RNA, 19 nt, artificial
  Chemically synthesized
aaggcagguuauaaggcac

SEQ ID NO: 23104 - RNA, 19 nt, artificial
  Chemically synthesized
uaugucaccagaaauuccc

SEQ ID NO: 23105 - RNA, 19 nt, artificial
  Chemically synthesized
cuuucagauuauaucaugg

SEQ ID NO: 23106 - RNA, 19 nt, artificial
  Chemically synthesized
auugcaaacaaugacucuc

SEQ ID NO: 23107 - RNA, 19 nt, artificial
  Chemically synthesized
aaaauugucugccauuuuc

SEQ ID NO: 23108 - RNA, 19 nt, artificial
  Chemically synthesized
uugucugccauuuuccgcu

SEQ ID NO: 23109 - RNA, 19 nt, artificial
  Chemically synthesized
ucauugaguuuuuuaaccc

SEQ ID NO: 23110 - RNA, 19 nt, artificial
  Chemically synthesized
cauugaguuuuuuaacccg

SEQ ID NO: 23111 - RNA, 19 nt, artificial
  Chemically synthesized
aucauucacugcaaccuug

SEQ ID NO: 23112 - RNA, 19 nt, artificial
  Chemically synthesized
augaagcacuggugagguc

SEQ ID NO: 23113 - RNA, 19 nt, artificial
  Chemically synthesized
auugaagcguggguuaaag

SEQ ID NO: 23114 - RNA, 19 nt, artificial
  Chemically synthesized
aaaaccgacugucuuucuu

SEQ ID NO: 23115 - RNA, 19 nt, artificial
  Chemically synthesized
ugucugccauuuuccgcuc

SEQ ID NO: 23116 - RNA, 19 nt, artificial
  Chemically synthesized
uccagacccagauaacgca

SEQ ID NO: 23117 - RNA, 19 nt, artificial
  Chemically synthesized
uagaugacuuacaagaggg

SEQ ID NO: 23118 - RNA, 19 nt, artificial
  Chemically synthesized
ugucaccagaaauucccag

SEQ ID NO: 23119 - RNA, 19 nt, artificial
  Chemically synthesized
uuaacccgaugauuguacu

SEQ ID NO: 23120 - RNA, 19 nt, artificial
  Chemically synthesized
uuguauugcaaacaaugac

SEQ ID NO: 23121 - RNA, 19 nt, artificial
  Chemically synthesized
ucacagugaacaugaaacc

SEQ ID NO: 23122 - RNA, 19 nt, artificial
  Chemically synthesized
uauccagcuuuguauugca

SEQ ID NO: 23123 - RNA, 19 nt, artificial
  Chemically synthesized
uuguucucauugaagcgug

SEQ ID NO: 23124 - RNA, 19 nt, artificial
  Chemically synthesized
cugucuuucuucccuuccc

SEQ ID NO: 23125 - RNA, 19 nt, artificial
  Chemically synthesized
auaucaugguauaugaagc

SEQ ID NO: 23126 - RNA, 19 nt, artificial
  Chemically synthesized
auucacugcaaccuugaag

SEQ ID NO: 23127 - RNA, 19 nt, artificial
  Chemically synthesized
uguucucauugaagcgugg

SEQ ID NO: 23128 - RNA, 19 nt, artificial
  Chemically synthesized
agaugacuuacaagaggga

SEQ ID NO: 23129 - RNA, 19 nt, artificial
  Chemically synthesized
aaaugggaaaaccgacugu

SEQ ID NO: 23130 - RNA, 19 nt, artificial
  Chemically synthesized
guuguucucauugaagcgu

SEQ ID NO: 23131 - RNA, 19 nt, artificial
  Chemically synthesized
uguauugcaaacaaugacu

SEQ ID NO: 23132 - RNA, 19 nt, artificial
  Chemically synthesized
uucucauugaagcgugggu

SEQ ID NO: 23133 - RNA, 19 nt, artificial
  Chemically synthesized
aaggcaacaucauucccuc

SEQ ID NO: 23134 - RNA, 19 nt, artificial
  Chemically synthesized
guuugcugauuucauugag

SEQ ID NO: 23135 - RNA, 19 nt, artificial
  Chemically synthesized
uuucccacuuucaaauggg

SEQ ID NO: 23136 - RNA, 19 nt, artificial
  Chemically synthesized
auaaggcacaaucaguggc

SEQ ID NO: 23137 - RNA, 19 nt, artificial
  Chemically synthesized
guagaugacuuacaagagg

SEQ ID NO: 23138 - RNA, 19 nt, artificial
  Chemically synthesized
uuacacauguaagguuuag

SEQ ID NO: 23139 - RNA, 19 nt, artificial
  Chemically synthesized
aucaugguauaugaagcac

SEQ ID NO: 23140 - RNA, 19 nt, artificial
  Chemically synthesized
caaaugggaaaaccgacug

SEQ ID NO: 23141 - RNA, 19 nt, artificial
  Chemically synthesized
cuugaggguuuggguuucc

SEQ ID NO: 23142 - RNA, 19 nt, artificial
  Chemically synthesized
uuguacugcaacaagugag

SEQ ID NO: 23143 - RNA, 19 nt, artificial
  Chemically synthesized
uuaaaguggaaggcaacau

SEQ ID NO: 23144 - RNA, 19 nt, artificial
  Chemically synthesized
auuuuccgcucguuggcug

SEQ ID NO: 23145 - RNA, 19 nt, artificial
  Chemically synthesized
gauaacgcaucauggagcg

SEQ ID NO: 23146 - RNA, 19 nt, artificial
  Chemically synthesized
auugaguuuuuuaacccga

SEQ ID NO: 23147 - RNA, 19 nt, artificial
  Chemically synthesized
guuucccacuuucaaaugg

SEQ ID NO: 23148 - RNA, 19 nt, artificial
  Chemically synthesized
acuuucaaaugggaaaacc

SEQ ID NO: 23149 - RNA, 19 nt, artificial
  Chemically synthesized
guauugcaaacaaugacuc

SEQ ID NO: 23150 - RNA, 19 nt, artificial
  Chemically synthesized
ugaagggugaaauauucuc

SEQ ID NO: 23151 - RNA, 19 nt, artificial
  Chemically synthesized
caaauuuccuuccacucgg

SEQ ID NO: 23152 - RNA, 19 nt, artificial
  Chemically synthesized
gucgaaaaguguuucuguc

SEQ ID NO: 23153 - RNA, 19 nt, artificial
  Chemically synthesized
auuccagcaaauuucaggu

SEQ ID NO: 23154 - RNA, 19 nt, artificial
  Chemically synthesized
aucaucaaaaagcucucug

SEQ ID NO: 23155 - RNA, 19 nt, artificial
  Chemically synthesized
augagauagauugcaugug

SEQ ID NO: 23156 - RNA, 19 nt, artificial
  Chemically synthesized
uuuaaaaugaucaccucgg

SEQ ID NO: 23157 - RNA, 19 nt, Artificial
  Chemically synthesized
auuuuaaagauguggucac
